(19) United States
(12) Patent Application Publication
(10) Pub. No.: US 2026/0209793 A1
(43) Pub. Date: Jul. 23, 2026

(54) RECOMBINANT REGULATORY SEQUENCES AND THERAPEUTIC REGULATING OF SPLICING

(71) Applicant: Emugen Therapeutics LLC, Woburn, MA (US)

(72) Inventors: Jonathan J. Wilde, Waltham, MA (US); Tobias Kaiser, Boston, MA (US); Xian Gao, Belmont, MA (US); Olga Brevnova, Somerville, MA (US); Tomomi Aida, Arlington, MA (US); Yuanyuan Hou, Cambridge, MA (US); Tyler Brown, Somerville, MA (US)

(21) Appl. No.: 19/636,499

(22) Filed: Apr. 1, 2026

Related U.S. Application Data
(63) Continuation of application No. PCT/US24/50737, filed on Oct. 10, 2024.
(60) Provisional application No. 63/589,511, filed on Oct. 11, 2023.

(51) Int. Cl. C12N 15/85; C12N 15/113; C12N 15/67

(52) U.S. Cl. CPC C12N 15/85; C12N 15/113; C12N 15/67; C12N 2320/33; C12N 2830/36

(57) ABSTRACT

Disclosed herein are systems for modifying nucleic acid splicing of a target RNA. The system may be useful in a method such as a method for treating a genetic disorder such as epilepsy. The system may include an expression system, or a modified small nuclear RNA (snRNA) that includes an exonic splicing silencer (ESS) sequence, and a target nucleic acid sequence that targets the target RNA. Described herein are recombinant regulatory elements for expression systems. Also described are nucleic acid expression systems with recombinant regulatory elements.

### CROSS-REFERENCE

[0001] This application is a Continuation application of International Patent Application No. PCT/US2024/050737 filed Oct. 10, 2024, which claims the benefit of U.S. Provisional Application No. 63/589,511, filed Oct. 11, 2023, which application is incorporated herein by reference.

### INCORPORATION BY REFERENCE OF SEQUENCE LISTING

[0002] The present application is being filed along with a Sequence Listing in electronic format. The Sequence Listing is provided as a file entitled 062692-506001WO.xml, created Oct. 9, 2024, which is 1,488,898 bytes in size. The information in the electronic format of the Sequence Listing is incorporated by reference in its entirety.

### BACKGROUND

[0003] Improved expression systems are needed for expressing recombinant genes. Additionally, epileptic disorders and genetic disorders such as Dravet syndrome are a concern for many individuals, and improved treatments are needed.

### SUMMARY

[0004] Described herein are recombinant regulatory elements for expression systems. Also described are nucleic acid expression systems with recombinant regulatory elements. The regulatory elements and systems described herein address needs for improved expression systems, such as for gene editing or for transgenic expression.

[0005] Described herein, in some embodiments, are nucleic acid expression systems, comprising: a regulatory sequence operably coupled to a transcribable region of a nucleic acid, the regulatory sequence comprising a proximal regulatory sequence element (PSE) and a distal regulatory sequence element (DSE); wherein the PSE comprises a PSE sequence of a first small nuclear RNA (snRNA) of a first organism species, wherein the DSE comprises a DSE sequence of a second small nuclear RNA (snRNA) of a second organism species, and wherein the first and second snRNAs are different or wherein the first and second organism species are different. In some embodiments, the first snRNA is selected from the group consisting of snRNA U1, snRNA U2, snRNA U3, snRNA U4, snRNA U5, snRNA U6, snRNA U7, snRNA U11, snRNA U12 and snRNA 7SK. In some embodiments, the second snRNA is selected from the group consisting of snRNA U7, snRNA U2, snRNA U3, snRNA U4, snRNA U5, snRNA U6, snRNA U1, snRNA U11, snRNA U12 and snRNA 7SK. In some embodiments, the first organism species is selected from the group consisting of human and mouse. In some embodiments, the second organism species is selected from the group consisting of mouse and human. In some embodiments, the first snRNA is selected from the group consisting of snRNA U1, snRNA U2, snRNA U3, snRNA U4, snRNA U5, snRNA U6, snRNA U7, snRNA U11, snRNA U12 and snRNA 7SK; the second snRNA is selected from the group consisting of snRNA U7, snRNA U2, snRNA U3, snRNA U4, snRNA U5, snRNA U6, snRNA U1, snRNA U11, snRNA U12 and snRNA 7SK; the first organism species is selected from the group consisting of human and mouse; and the second organism species is selected from the group consisting of mouse and human. In some embodiments, the regulatory sequence comprises a promoter sequence. In some embodiments, the regulatory sequence comprises a promoter sequence. In some embodiments, the regulatory sequence comprises a terminator sequence. In some embodiments, the regulatory sequence comprises a terminator sequence. In some embodiments, the expression system produces a greater amount of RNA from the transcribable region than an expression system having a wild-type promoter and wild-type terminator operably coupled to the transcribable region. In some embodiments, the amount of RNA produced is at least 10% greater. Described herein, in some embodiments, are methods of producing a ribonucleic acid (RNA), comprising contacting a cell with the expression system.

[0006] Described herein, in some embodiments, are nucleic acid expression systems, comprising: a regulatory sequence operably coupled to a transcribable region of a nucleic acid, the regulatory sequence comprising a proximal regulatory sequence element (PSE) and a distal regulatory sequence element (DSE); wherein the PSE comprises a mouse U1 snRNA (“MmU1”) PSE, a mouse U2 snRNA (“MmU2”) PSE, a mouse U3 snRNA (“MmU3”) PSE, a mouse U4 snRNA (“MmU4”) PSE, a mouse U5 snRNA (“MmU5”) PSE, a mouse U6 snRNA (“MmU6”) PSE, a mouse U7 snRNA (“MmU7”) PSE, a mouse U11 snRNA (“MmU11”) PSE, a mouse U12 snRNA (“MmU12”) PSE, a mouse U7SK snRNA (“MmU7SK”) PSE, a human U1 snRNA (“HsU1”) PSE, a human U2 snRNA (“HsU2”) PSE, a human U3 snRNA (“HsU3”) PSE, a human U4 snRNA (“HsU4”) PSE, a human U5 snRNA (“HsU5”) PSE, a human U6 snRNA (“HsU6”) PSE, a human U7 snRNA (“HsU7”) PSE, a human U11 snRNA (“HsU11”) PSE, a human U12 snRNA (“HsU12”) PSE, or a human U7SK snRNA (“HsU7SK”) PSE; wherein the DSE comprises a mouse U1 snRNA (“MmU1”) DSE, a mouse U2 snRNA (“MmU2”) DSE, a mouse U3 snRNA (“MmU3”) DSE, a mouse U4 snRNA (“MmU4”) DSE, a mouse U5 snRNA (“MmU5”) DSE, a mouse U6 snRNA (“MmU6”) DSE, a mouse U7 snRNA (“MmU7”) DSE, a mouse U11 snRNA (“MmU11”) DSE, a mouse U12 snRNA (“MmU12”) DSE, a mouse U7SK snRNA (“MmU7SK”) DSE, a human U1 snRNA (“HsU1”) DSE, a human U2 snRNA (“HsU2”) DSE, a human U3 snRNA (“HsU3”) DSE, a human U4 snRNA (“HsU4”) DSE, a human U5 snRNA (“HsU5”) DSE, a human U6 snRNA (“HsU6”) DSE, a human U7 snRNA (“HsU7”) DSE, a human U11 snRNA (“HsU11”) DSE, a human U12 snRNA (“HsU12”) DSE, or a human U7SK snRNA (“HsU7SK”) DSE; and wherein the PSE and the DSE are from a different species as each other, or from a different snRNA as each other. In some embodiments, the PSE and the DSE are from a different species as each other, and from a different snRNA as each other. In some embodiments, the regulatory sequence comprises a promoter sequence. In some embodiments, the regulatory sequence comprises a terminator sequence. In some embodiments, the expression system produces a greater amount of RNA from the transcribable region than an expression system having a wild-type promoter and wild-type terminator operably coupled to the transcribable region. In some embodiments, the amount of RNA produced is at least 10% greater. Described herein, in some embodiments, are methods of producing a ribonucleic acid (RNA), comprising contacting a cell with the expression system.

[0007] Described herein, in some embodiments, are nucleic acid expression systems, comprising: a promoter sequence comprising a promoter proximal sequence element (PSE) and a promoter distal sequence element (DSE); wherein the PSE comprises a mouse U1 snRNA (“MmU1”) promoter PSE, a mouse U2 snRNA (“MmU2”) promoter PSE, a mouse U3 snRNA (“MmU3”) promoter PSE, a mouse U4 snRNA (“MmU4”) promoter PSE, a mouse U5 snRNA (“MmU5”) promoter PSE, a mouse U6 snRNA (“MmU6”) promoter PSE, a mouse U7 snRNA (“MmU7”) promoter PSE, a mouse U11 snRNA (“MmU11”) promoter PSE, a mouse U12 snRNA (“MmU12”) promoter PSE, a mouse U7SK snRNA (“MmU7SK”) promoter PSE, a human U1 snRNA (“HsU1”) promoter PSE, a human U2 snRNA (“HsU2”) promoter PSE, a human U3 snRNA (“HsU3”) promoter PSE, a human U4 snRNA (“HsU4”) promoter PSE, a human U5 snRNA (“HsU5”) promoter PSE, a human U6 snRNA (“HsU6”) promoter PSE, a human U7 snRNA (“HsU7”) promoter PSE, a human U11 snRNA (“HsU11”) promoter PSE, a human U12 snRNA (“HsU12”) promoter PSE, or a human U7SK snRNA (“HsU7SK”) promoter PSE; wherein the DSE comprises a mouse U1 snRNA (“MmU1”) promoter DSE, a mouse U2 snRNA (“MmU2”) promoter DSE, a mouse U3 snRNA (“MmU3”) promoter DSE, a mouse U4 snRNA (“MmU4”) promoter DSE, a mouse U5 snRNA (“MmU5”) promoter DSE, a mouse U6 snRNA (“MmU6”) promoter DSE, a mouse U7 snRNA (“MmU7”) promoter DSE, a mouse U11 snRNA (“MmU11”) promoter DSE, a mouse U12 snRNA (“MmU12”) promoter DSE, a mouse U7SK snRNA (“MmU7SK”) promoter DSE, a human U1 snRNA (“HsU1”) promoter DSE, a human U2 snRNA (“HsU2”) promoter DSE, a human U3 snRNA (“HsU3”) promoter DSE, a human U4 snRNA (“HsU4”) promoter DSE, a human U5 snRNA (“HsU5”) promoter DSE, a human U6 snRNA (“HsU6”) promoter DSE, a human U7 snRNA (“HsU7”) promoter DSE, a human U11 snRNA (“HsU11”) promoter DSE, a human U12 snRNA (“HsU12”) promoter DSE, or a human U7SK snRNA (“HsU7SK”) promoter DSE; and wherein the promoter PSE and the promoter DSE are from a different species as each other, or from a different snRNA as each other. In some embodiments, the promoter PSE and the promoter DSE are from a different species as each other, and from a different snRNA as each other. Some embodiments include a transcribable region operably coupled to the promoter sequence. Some embodiments include a terminator sequence 3′ to the transcribable region. In some embodiments, the expression system produces a greater amount of RNA from the transcribable region than an expression system having a wild-type promoter and wild-type terminator operably coupled to the transcribable region. In some embodiments, the amount of RNA produced is at least 10% greater. Described herein, in some embodiments, are methods of producing a ribonucleic acid (RNA), comprising contacting a cell with the expression system.

[0008] Described herein, in some embodiments, are nucleic acid expression systems, comprising, comprising: a terminator sequence 3′ to a transcribable region, the terminator sequence comprising a terminator proximal sequence element (PSE) and a terminator distal sequence element (DSE); wherein the PSE comprises a mouse U1 snRNA (“MmU1”) terminator PSE, a mouse U2 snRNA (“MmU2”) terminator PSE, a mouse U3 snRNA (“MmU3”) terminator PSE, a mouse U4 snRNA (“MmU4”) terminator PSE, a mouse U5 snRNA (“MmU5”) terminator PSE, a mouse U6 snRNA (“MmU6”) terminator PSE, a mouse U7 snRNA (“MmU7”) terminator PSE, a mouse U11 snRNA (“MmU11”) terminator PSE, a mouse U12 snRNA (“MmU12”) terminator PSE, a mouse U7SK snRNA (“MmU7SK”) terminator PSE, a human U1 snRNA (“HsU1”) terminator PSE, a human U2 snRNA (“HsU2”) terminator PSE, a human U3 snRNA (“HsU3”) terminator PSE, a human U4 snRNA (“HsU4”) terminator PSE, a human U5 snRNA (“HsU5”) terminator PSE, a human U6 snRNA (“HsU6”) terminator PSE, a human U7 snRNA (“HsU7”) terminator PSE, a human U11 snRNA (“HsU11”) terminator PSE, a human U12 snRNA (“HsU12”) terminator PSE, or a human U7SK snRNA (“HsU7SK”) terminator PSE; wherein the DSE comprises a mouse U1 snRNA (“MmU1”) terminator DSE, a mouse U2 snRNA (“MmU2”) terminator DSE, a mouse U3 snRNA (“MmU3”) terminator DSE, a mouse U4 snRNA (“MmU4”) terminator DSE, a mouse U5 snRNA (“MmU5”) terminator DSE, a mouse U6 snRNA (“MmU6”) terminator DSE, a mouse U7 snRNA (“MmU7”) terminator DSE, a mouse U11 snRNA (“MmU11”) terminator DSE, a mouse U12 snRNA (“MmU12”) terminator DSE, a mouse U7SK snRNA (“MmU7SK”) terminator DSE, a human U1 snRNA (“HsU1”) terminator DSE, a human U2 snRNA (“HsU2”) terminator DSE, a human U3 snRNA (“HsU3”) terminator DSE, a human U4 snRNA (“HsU4”) terminator DSE, a human U5 snRNA (“HsU5”) terminator DSE, a human U6 snRNA (“HsU6”) terminator DSE, a human U7 snRNA (“HsU7”) terminator DSE, a human U11 snRNA (“HsU11”) terminator DSE, a human U12 snRNA (“HsU12”) terminator DSE, or a human U7SK snRNA (“HsU7SK”) terminator DSE; and wherein the terminator PSE and the terminator DSE are from a different species as each other, or from a different snRNA as each other. In some embodiments, the terminator PSE and the terminator DSE are from a different species as each other, and from a different snRNA as each other. Some embodiments include a promoter sequence, wherein the transcribable region is operably coupled to the promoter sequence. In some embodiments, the expression system produces a greater amount of functional RNA from the transcribable region than an expression system having a wild-type U7 promoter and wild-type U7 terminator operably coupled to the transcribable region. In some embodiments, the amount of functional RNA produced is at least 10% greater. Described herein, in some embodiments, are methods of producing a ribonucleic acid (RNA), comprising contacting a cell with the expression system.

[0009] Described herein, in some embodiments, are nucleic acid expression systems, comprising, comprising: a promoter sequence operably coupled to a transcribable region of a nucleic acid, and a terminator sequence coupled to the transcribable region; wherein the promoter sequence comprises a promoter sequence of a first small nuclear RNA (snRNA) of a first organism species, wherein the terminator sequence comprises a terminator sequence of a second small nuclear RNA (snRNA) of a second organism species, and wherein the first and second snRNAs are different or wherein the first and second organism species are different. In some embodiments, the first snRNA is selected from the group consisting of snRNA U1, snRNA U2, snRNA U3, snRNA U4, snRNA U5, snRNA U6, snRNA U7, snRNA U11, snRNA U12 and snRNA 7SK. In some embodiments, the second snRNA is selected from the group consisting of snRNA U7, snRNA U2, snRNA U3, snRNA U4, snRNA U5, snRNA U6, snRNA U1, snRNA U11, snRNA U12 and snRNA 7SK. In some embodiments, the first snRNA is selected from the group consisting of snRNA U1, snRNA U2, snRNA U3, snRNA U4, snRNA U5, snRNA U6, snRNA U7, snRNA U11, snRNA U12 and snRNA 7SK; the second snRNA is selected from the group consisting of snRNA U7, snRNA U2, snRNA U3, snRNA U4, snRNA U5, snRNA U6, snRNA U1, snRNA U11, snRNA U12 and snRNA 7SK; the first organism species is selected from the group consisting of human and mouse; and the second organism species is selected from the group consisting of mouse and human. In some embodiments, the promoter comprises a promoter PSE sequence and a promoter DSE sequence, and wherein the either the promoter PSE or the promoter DSE is of a different organism species than the first organism species. In some embodiments, the promoter comprises a promoter PSE sequence and a promoter DSE sequence, and wherein the either the promoter PSE or the promoter DSE is of a different snRNA than the first snRNA. In some embodiments, the promoter comprises a promoter PSE sequence and a promoter DSE sequence, and wherein the either the promoter PSE or the promoter DSE is of a different organism species than the first organism species; and wherein the promoter comprises a promoter PSE sequence and a promoter DSE sequence, and wherein the either the promoter PSE or the promoter DSE is of a different snRNA than the first snRNA. In some embodiments, the terminator comprises a terminator PSE sequence and a terminator DSE sequence, and wherein the either the terminator PSE or the terminator DSE is of a different organism species than the second organism species. In some embodiments, the terminator comprises a terminator PSE sequence and a terminator DSE sequence, and wherein the either the terminator PSE or the terminator DSE is of a different snRNA than the second snRNA. In some embodiments, the terminator comprises a terminator PSE sequence and a terminator DSE sequence, and wherein the either the terminator PSE or the terminator DSE is of a different organism species than the second organism species; and wherein the terminator comprises a terminator PSE sequence and a terminator DSE sequence, and wherein the either the terminator PSE or the terminator DSE is of a different snRNA than the second snRNA. In some embodiments, the promoter comprises a promoter PSE sequence and a promoter DSE sequence, and wherein the either the promoter PSE or the promoter DSE is of a different organism species than the first organism species; and wherein the promoter comprises a promoter PSE sequence and a promoter DSE sequence, and wherein the either the promoter PSE or the promoter DSE is of a different snRNA than the first snRNA; wherein the terminator comprises a terminator PSE sequence and a terminator DSE sequence, and wherein the either the terminator PSE or the terminator DSE is of a different organism species than the second organism species; and wherein the terminator comprises a terminator PSE sequence and a terminator DSE sequence, and wherein the either the terminator PSE or the terminator DSE is of a different snRNA than the second snRNA. In some embodiments, the expression system produces a greater amount of RNA from the transcribable region than an expression system having a wild-type promoter and wild-type terminator operably coupled to the transcribable region. In some embodiments, the amount of RNA produced is at least 10% greater. Described herein, in some embodiments, are methods of producing a ribonucleic acid (RNA), comprising contacting a cell with the expression system.

[0010] Described herein, in some embodiments, are nucleic acid expression systems, comprising: a promoter sequence comprising a mouse U1 snRNA (“MmU1”) promoter sequence, a mouse U2 snRNA (“MmU2”) promoter sequence, a mouse U3 snRNA (“MmU3”) promoter sequence, a mouse U4 snRNA (“MmU4”) promoter sequence, a mouse U5 snRNA (“MmU5”) promoter sequence, a mouse U6 snRNA (“MmU6”) promoter sequence, a mouse U7 snRNA (“MmU7”) promoter sequence, a mouse U11 snRNA (“MmU11”) promoter sequence, a mouse U12 snRNA (“MmU12”) promoter sequence, a mouse U7SK snRNA (“MmU7SK”) promoter sequence, a human U1 snRNA (“HsU1”) promoter sequence, a human U2 snRNA (“HsU2”) promoter sequence, a human U3 snRNA (“HsU3”) promoter sequence, a human U4 snRNA (“HsU4”) promoter sequence, a human U5 snRNA (“HsU5”) promoter sequence, a human U6 snRNA (“HsU6”) promoter sequence, a human U7 snRNA (“HsU7”) promoter sequence, a human U11 snRNA (“HsU11”) promoter sequence, a human U12 snRNA (“HsU12”) promoter sequence, or a human U7SK snRNA (“HsU7SK”) promoter sequence, or a fragment or combination of fragments thereof, and a transcribable region operably coupled to the promoter sequence and to a terminator sequence comprising a mouse U1 snRNA (“MmU1”) terminator sequence, a mouse U2 snRNA (“MmU2”) terminator sequence, a mouse U3 snRNA (“MmU3”) terminator sequence, a mouse U4 snRNA (“MmU4”) terminator sequence, a mouse U5 snRNA (“MmU5”) terminator sequence, a mouse U6 snRNA (“MmU6”) terminator sequence, a mouse U7 snRNA (“MmU7”) terminator sequence, a mouse U11 snRNA (“MmU11”) terminator sequence, a mouse U12 snRNA (“MmU12”) terminator sequence, a mouse U7SK snRNA (“MmU7SK”) terminator sequence, a human U1 snRNA (“HsU1”) terminator sequence, a human U2 snRNA (“HsU2”) terminator sequence, a human U3 snRNA (“HsU3”) terminator sequence, a human U4 snRNA (“HsU4”) terminator sequence, a human U5 snRNA (“HsU5”) terminator sequence, a human U6 snRNA (“HsU6”) terminator sequence, a human U7 snRNA (“HsU7”) terminator sequence, a human U11 snRNA (“HsU11”) terminator sequence, a human U12 snRNA (“HsU12”) terminator sequence, or a human U7SK snRNA (“HsU7SK”) terminator sequence, or a fragment or combination of fragments thereof, wherein the promoter sequence and the terminator sequence are at least partially of a different organism species as each other, or are at least partially of a different snRNA as each other. In some embodiments, the promoter sequence and the terminator sequence are at least partially of a different organism species as each other, and are at least partially of a different snRNA as each other. In some embodiments, the expression system produces a greater amount of RNA from the transcribable region than an expression system having a wild-type promoter and wild-type terminator operably coupled to the transcribable region. In some embodiments, the amount of RNA produced is at least 10% greater. Described herein, in some embodiments, are methods of producing a ribonucleic acid (RNA), comprising contacting a cell with the expression system.

[0011] Disclosed herein, in some embodiments, are pharmaceutical compositions comprising a system described herein and a pharmaceutically acceptable carrier. Disclosed herein, in some embodiments, are engineered viruses comprising a system described herein. Disclosed herein, in some embodiments, are methods, comprising: administering a pharmaceutical composition or virus disclosed herein to a subject. In some embodiments, the virus comprises a parvovirus. In some embodiments, the virus is an adeno-associated virus (AAV). Disclosed herein, in some embodiments, are methods, comprising: administering the engineered virus to a subject. Disclosed herein, in some embodiments, are cells comprising a system described herein. In some embodiments, the cell is a neural cell.

### BRIEF DESCRIPTION OF THE DRAWINGS

[0012] FIG. 1 shows a pairwise alignment of mouse Scn1A and human SCN1A genomic regions including an NMD exon referred to as exon 20N.

[0013] FIG. 2 includes results of an initial U7 screen showing the rank of 96 U7 constructs based on the percent of productive Scn1A isoform expressed.

[0014] FIG. 3 includes an analysis of relative NMD transcript levels from Neuro-2a cells transfected with constructs expressing U7 cassettes containing single targeting sequences complementary to regions at both the 5′ and 3′ ends of mouse Scn1A exon 21N.

[0015] FIG. 4 includes an analysis of relative NMD transcript levels from Neuro-2a cells transfected with constructs expressing either single U7 cassettes or two U7 cassettes, with one targeting the 5′ region of exon 21N and one targeting the 3′ region of exon 21N (N=3 per construct).

[0016] FIG. 5 shows results of end-point RT-PCR for NMD (upper band) and productive (lower band) Scn1A isoform expression in brain tissue samples collected from animals transduced with AAV expressing either Scramble (Ctrl), Candidate 1, or Candidate 2 with 1×U7 cassettes. Each lane represents an individual animal.

[0017] FIG. 6 shows end-point RT-PCR for NMD (upper band) and productive (lower band) Scn1A isoform expression in samples collected from primary mouse cortical neurons transduced with AAVs expressing either Scramble (Ctrl), Candidate 1, or Candidate 2 with 4×U7 cassettes. Each pair of lanes shows independent biological replicates.

[0018] FIG. 7 shows end-point RT-PCR for NMD and productive Scn1A isoform expression in wildtype mice injected with increasing doses of AAVs expressing U7 candidates targeting mouse exon 21N.

[0019] FIG. 8 shows a dose-dependent increase in NaV1.1 protein expression in wildtype mice injected with AAVs expressing candidate U7 constructs targeting the 5′ end of mouse exon 21N. NaV1.1 levels are normalized to total protein levels in each sample.

[0020] FIG. 9 shows an analysis of relative NMD transcript levels in Neuro-2a cells transfected with constructs expressing the core U7 structural sequence with Candidate 1 targeting sequence under the control of different promoters and 3′ elements.

[0021] FIG. 10 shows a summary of end-point RT-PCR for relative amounts of productive Scn1A splice isoform in primary mouse cortical neurons transduced with increasing doses of AAVs expressing U7 candidate-1 driven by different combinations of mouse and human U1- and U7-related promoter and 3′ terminator elements.

[0022] FIG. 11 shows NaV1.1 levels in whole-brain lysates from mice injected with AAVs expressing U7 candidate 1 driven by different combinations of mouse and human U1-related promoter and 3′ terminator elements. NaV1.1 levels are normalized to total protein levels in each sample.

[0023] FIG. 12 shows survival curves of Scn1A control and heterozygous mutant mice injected with either AAV-mu1a1-Scramble-HU1 or AAV-mu1a1-Candidate 1-HU1.

[0024] FIG. 13 shows relative NMD transcript levels in Scn1A control and heterozygous mutant mice injected with either AAV-mu1a1-Scramble-HU1 or AAV-mu1a1-Candidate 1-HU1.

[0025] FIG. 14 shows total SCN1A mRNA levels in Scn1A control and heterozygous mutant mice injected with either AAV-mu1a1-Scramble-HU1 or AAV-mu1a1-Candidate 1-HU1.

[0026] FIG. 15 shows relative NaV1.1 levels in Scn1A control and heterozygous mutant mice injected with either AAV-mu1a1-Scramble-HU1 or AAV-mu1a1-Candidate 1-HU1.

[0027] FIG. 16 shows spontaneous seizure frequency (seizures/24 hr) measured by EEG in Scn1A control and heterozygous mutant mice injected with either saline or U7 AAV (Candidate 3; AAV9) at P2 via ICV. EEG recordings were made from P24-P45 and total seizure counts were averaged over the entire 21-day recording period.

[0028] FIG. 17 shows mean seizure duration in heterozygous Scn1A^{+/-} animals exhibiting spontaneous seizures after injection with either saline or U7 AAV (Candidate 3; AAV9) injected via ICV at P2. EEG recording was performed from P24-P45.

[0029] FIG. 18 shows survival curves of Scn1A control and heterozygous mutant mice injected with either saline or U7 AAV (Candidate 3; AAV9) at P2 via ICV.

[0030] FIG. 19 shows survival curves of Scn1A control and heterozygous mutant mice injected with either saline or U7 AAV (Candidate 3; AAV9) at P2 via ICV.

[0031] FIG. 20 shows relative NaV1.1 protein levels at P90 in Scn1A control and heterozygous mutant mice injected with either saline or U7 AAV (Candidate 3; AAV9) at P2 via ICV.

[0032] FIG. 21 shows relative NaV1.1 protein levels at P90 in Scn1A control and heterozygous mutant mice injected with either saline or U7 AAV (Candidate 3; PHP.eB) at P14 via retroorbital injection.

[0033] FIG. 22 shows quantification of SCN1A NMD isoform levels by end-point RT-PCR from differentiated human neuronal cultures (ReNcell CX) treated with formulation buffer (vehicle) or three different doses of AAV encoding Candidate 3.

[0034] FIG. 23 shows quantification of SCN1A productive isoform levels by end-point RT-PCR from differentiated human neuronal cultures (ReNcell CX) treated with formulation buffer (vehicle) or three different doses of AAV encoding Candidate 3.

[0035] FIG. 24 includes a schematic of a luciferase reporter containing a ubiquitous promoter (Ubc-SV40 pA), a canonical Kozak sequence, a fragment of mouse Scn2a exon 13, a fragment of mouse Scn2a intron 13, mouse Scn2a exon 13N, another fragment of mouse Scn2a intron 13, and a fragment of mouse Scn2a exon 14 fused in-frame to firefly luciferase.

[0036] FIG. 25 (top) includes results of end-point RT-PCR for NMD (upper band) and productive (lower band) and (bottom) an analysis of relative NMD and productive isoform transcript levels of Scn2a exon 13 in mouse Neuro-2a cells expressing a candidate ESS and U7 antisense sequence when driven by the combination of the mu1a1 promoter and HU1 terminator.

[0037] FIG. 26 shows relative NaV1.2 levels in differentiated ReNcell CX cultures transduced with scramble or three different U7 targeting sequences identified with this system. NaV1.2 levels in the plot within the figure were normalized to Actinin protein levels in each sample.

### DETAILED DESCRIPTION

[0038] Promoters and terminators play an indispensable role in regulating gene expression. These critical elements play a part in regulating both the strength of transcription and the longevity of the transcript. Together, promoters and terminators dictate the overall abundance of mRNA within the cell and ultimately play a significant role in determining protein contents within the cell. In the case of small nuclear RNAs, promoters and terminators may play a critical role in formation of secondary structures that may be required for snRNA function. Optimizing recombinant gene expression for gene therapy often requires the testing of multiple combinations of promoters and terminators to fine-tune the correct level and timing of expression. Initially, naturally occurring promoters and terminators were tested for their ability to drive their native gene expression in different cell types with some success but there was still a need to further control the level and timing of expression. To address this problem promoter and terminator swapping and mutagenesis was employed to optimize the level and timing of expression. Promoter and terminator swapping and mutagenesis has allowed researchers to specifically titrate the amount of transcription, the timing of transcription and the specific cell populations that express the gene in vivo. Nevertheless, this process of testing various promoter and terminator combinations requires the development of platforms for each gene therapy application. These platforms allow researchers to vary the amount of transcription, timing of transcription and the cell populations that express the gene therapy both in vitro and in vivo. Development of physiologically relevant platforms to test gene therapy variants may be necessary to develop the best gene therapies for a number of genetic disorders, including Dravet syndrome.

[0039] Precise pre-mRNA splicing may be essential for appropriate protein translation and may depend on the presence of consensus ‘cis’ sequences that define exon-intron boundaries and regulatory sequences recognized by splicing machinery. Point mutations at these consensus sequences can cause improper exon and intron recognition and may result in the formation of an aberrant transcript of the mutated gene. The splicing mutation may occur in both introns and exons and disrupt existing splice sites or splicing regulatory sequences (intronic and exonic silencers and enhancers), create new ones, or activate crypticones. Usually, such mutations result in errors during the splicing process and may lead to improper intron removal and thus cause alterations of an open reading frame (ORF). Alterations in the open reading frame may lead to truncated or extended mRNA products resulting in the translated protein unable to perform its normal function due to misfolding or degradation. Loss or reduced expression of proteins due to mRNA spicing errors lead to a number of genetic disorders, including Dravet syndrome.

[0040] Described herein are recombinant regulatory elements for expression systems. Also described are nucleic acid expression systems with recombinant regulatory elements. The regulatory elements and systems described herein address needs for improved expression systems, such as for gene editing or for transgenic expression.

[0041] Mutation of SCN1A, which encodes sodium channel NaV1.1, is a leading genetic cause of neurodevelopmental disorders such as Dravet syndrome. Analysis of ribonucleic acid (RNA) sequence data has identified an alternate SCN1A mRNA isoform that includes an extra exon, referred to as exon 20N. This alternate isoform is out of frame and results in nonsense-mediated decay (NMD).

[0042] Dravet syndrome is a devastating epileptic encephalopathy that may arise in otherwise normal babies in the first year of life, later accompanied by developmental delay, intellectual disability and mood disorders. The majority of cases (80%) may be caused by haploinsufficiency of SCN1A, a gene that encodes alpha subunit of the voltage-gated sodium channel protein, NaV1.1. NaV1.1 may also be referred to as sodium channel protein type 1 subunit alpha (SCN1A) protein. Current pharmacological treatments for Dravet syndrome are unable to completely control the epileptic seizures associated with the syndrome. Additionally, the pharmacological treatments are ineffective at inhibiting the subsequent neurological symptoms associated with Dravet syndrome. As a result, there are a number of gene-based therapies being developed for Dravet syndrome. One major obstacle for gene therapies for Dravet syndrome is that the SCN1A-coding sequence is too large to package in adeno-associated vectors (AAV) that are commonly employed for therapeutic gene delivery in the central nervous system. In recent years, alternative genetic approaches aiming to restore physiological levels of NaV1.1 to treat Dravet syndrome have been developed. These strategies rely on boosting the expression of the healthy copy of an SCN1A gene at the transcriptional or post-transcriptional level. One strategy to restore physiological levels of NaV1.1 is through targeted augmentation of nuclear gene output (TANGO). TANGO utilizes antisense oligonucleotides that are specifically designed to target the non-productive splicing site associated with Dravet syndrome and results in expression of the functional NaV1.1 protein. The current application includes a method of treating Dravet syndrome through the delivery of a modified U7 small nuclear RNA (snRNA) targeting exon 20N in humans (21N in mice) of neural cells via AAV so that a functional NaV1.1 protein is expressed and results in increased function of the NaV1.1 protein.

[0043] Described herein are compositions and methods for treating a neurodevelopmental disorder in a subject in need thereof. The compositions and methods described herein address an unmet need for safe and effective treatment of neurodevelopmental disorders. The neurodevelopmental disorder may be genetically caused, such as by a mutation in SCN1A (e.g. resulting in SCN1A haploinsufficiency). Described herein are compositions and methods for treating epileptic disorders such as Dravet syndrome in a subject in need thereof. The compositions and methods described herein address an unmet need for safe and effective treatment of epileptic disorders such as Dravet syndrome. The mutation may lead to aberrant SCN1A splicing, or result in inclusion of exon 20N in a mature SCN1A mRNA transcript. Examples of neurodevelopmental disorders may include an intellectual disability or epilepsy (e.g. including seizures).

[0044] The compositions and methods provided herein may improve upon pervious methods and systems. Some previous systems include are described at WO2017106377, WO2019040923, Han et al., Antisense oligonucleotides increase Scn1a expression and reduce seizures and SUDEP incidence in a mouse model of Dravet syndrome (Sci Transl Med. 2020 Aug. 26; 12(558):eaaz6100.), and Tanenhaus et al., Cell-Selective Adeno-Associated Virus-Mediated SCN1A Gene Regulation Therapy Rescues Mortality and Seizure Phenotypes in a Dravet Syndrome Mouse Model and Is Well Tolerated in Nonhuman Primates (Hum Gene Ther. 2022 June; 33(11-12):579-597), which references are incorporated by reference in their entirety.

[0045] In some embodiments, the system reduces a target (e.g. protein or RNA, such as a SCN1A protein or RNA) measurement in a cell or population of cells by at least 5%, at least 10%, at least 15%, at least 20%, at least 25%, at least 30%, at least 35%, at least 40%, at least 45%, at least 50%, at least 55%, at least 60%, at least 65%, at least 70%, at least 75%, or at least 80%, relative to a baseline target measurement. In some embodiments, the system reduces a target (e.g. protein or RNA, such as a SCN1A protein or RNA) measurement in a cell or population of cells by less than 5%, less than 10%, less than 15%, less than 20%, less than 25%, less than 30%, less than 35%, less than 40%, less than 45%, less than 50%, less than 55%, less than 60%, less than 65%, less than 70%, less than 75%, or less than 80%, relative to a baseline target measurement.

[0046] Some embodiments include a system for modifying nucleic acid splicing. The system may include an exonic splicing silencer (ESS) nucleic acid sequence that enhances splicing suppression. The system may include an antisense nucleic acid sequence that targets an alternatively spliced region of an RNA. The antisense nucleic acid sequence may encode an SCN1A protein. Described herein, in some embodiments, is a system for modifying nucleic acid splicing comprising ESS nucleic acid sequence and an antisense nucleic acid sequence that targets an alternatively spliced region of an RNA encoding an SCN1A protein.

[0047] Some embodiments relate to a system for modifying nucleic acid splicing, comprising: an engineered U7 snRNA comprising an antisense nucleic acid sequence that targets an alternatively spliced region of an RNA encoding an SCN1A protein. In some embodiments, the engineered U7 snRNA further comprises an ESS nucleic acid sequence. In some embodiments, the engineered U7 snRNA does not comprise an ESS nucleic acid sequence.

[0048] Disclosed herein, in some embodiments, are systems for modifying nucleic acid splicing. In some embodiments, the system may include an ESS nucleic acid sequence. In some embodiments, the system may include an antisense nucleic acid sequence that targets an alternatively spliced region of an RNA. In some embodiments, the targeted RNA encodes an SCN1A protein.

[0049] Described herein, in some embodiments, is a nucleic acid system that may include deoxyribonucleic acid (DNA). The DNA may include an expression cassette. In some embodiments, the nucleic acid system that may include ribonucleic acid (RNA). The RNA may be encoded by the expression cassette.

### Targeted RNAs and Alternatively Spliced Regions of Targeted RNAs

[0050] Described herein, in some embodiments, are methods or systems that affect splicing of a target RNA. SCN1A RNA is an example of a target RNA. A target RNA may be or include a target transcript. A target RNA may be or include a target mRNA. A target RNA may be or include a target pre-mRNA. A target RNA may include a targeted exon. A target RNA may include a targeted intron. A target RNA may include a targeted intron/exon junction.

[0051] A target RNA may include a targeted region. A targeted region may bind with or be bound by an antisense nucleic acid sequence. A targeted region may include an alternatively spliced region such as an alternative exon (e.g. exon 20N). A targeted region may include a splice junction of an alternative exon (e.g. an intron/exon junction comprising at least part of exon 20N). A targeted region may include a region near an alternative exon such as an intron sequence. A targeted region may include an intron sequence. A targeted region may include an alternative exon. A targeted region may exclude an intron. A targeted region may exclude an alternative exon. A targeted region may include part of an intron sequence. A targeted region may include part of an alternative exon. A targeted region may exclude part of an intron sequence. A targeted region may exclude part of an alternative exon. A targeted region may encompass both a region near an alternative exon and at least part of the alternative exon.

[0052] Some embodiments refer to or include an alternatively spliced region of a target RNA, such as an alternatively spliced region of an SCN1A RNA. For example, some embodiments of a system or method include or refer to an antisense nucleic acid sequence that targets an alternatively spliced region of a target RNA such as an SCN1A RNA. An example of an alternatively spliced region is exon 20N of an SCN1A RNA. An example of an SCN1A mRNA transcript including exon 20N may be found at www.ncbi.nlm.nih.gov under reference sequence NR_148667.2, as last updated as of the effective filing date.

[0053] The alternatively spliced region may be or include an alternatively spliced exon. The alternatively spliced region may be out of frame with a productive transcript. This may lead to production of a downstream stop codon. In some embodiments, inclusion of the alternatively spliced region results in an mRNA (e.g. a mature SCN1A mRNA) having a premature stop codon. Inclusion of a premature stop codon may result in a non-productive mRNA. Inclusion of a premature stop codon may result in the mRNA being non-productive for functional or full-length SCN1A protein. Inclusion of a premature stop codon may result in nonsense mediated decay. In some embodiments, the alternatively spliced regions out of frame with an exon of a productive transcript. In some embodiments, the alternatively spliced region may include a stop codon. In some embodiments, the alternatively spliced region does not include a stop codon.

[0054] In some embodiments, the alternatively spliced region may be an alternatively spliced exon. In some embodiments, the alternatively spliced region may not be an alternatively spliced exon. In some embodiments, the alternatively spliced region is an alternatively spliced intron. In some embodiments, the alternatively spliced exon comprises exon 20N (e.g. of a human SCN1A mRNA). In some embodiments, the alternatively spliced exon comprises exon 21N (e.g. of a mouse SCN1A mRNA).

[0055] A targeted region may include SEQ ID NO: 153. A targeted region may include part of SEQ ID NO: 153. A targeted region may include a sequence at least 99% identical to SEQ ID NO: 153 or at least 99% identical to part of SEQ ID NO: 153. A targeted region may include a sequence at least 98% identical to SEQ ID NO: 153 or at least 98% identical to part of SEQ ID NO: 153. A targeted region may include a sequence at least 97% identical to SEQ ID NO: 153 or at least 97% identical to part of SEQ ID NO: 153. A targeted region may include a sequence at least 96% identical to SEQ ID NO: 153 or at least 96% identical to part of SEQ ID NO: 153. A targeted region may include a sequence at least 95% identical to SEQ ID NO: 153 or at least 95% identical to part of SEQ ID NO: 153. A targeted region may include a sequence at least 94% identical to SEQ ID NO: 153 or at least 94% identical to part of SEQ ID NO: 153. A targeted region may include a sequence at least 93% identical to SEQ ID NO: 153 or at least 93% identical to part of SEQ ID NO: 153. A targeted region may include a sequence at least 92% identical to SEQ ID NO: 153 or at least 92% identical to part of SEQ ID NO: 153. A targeted region may include a sequence at least 91% identical to SEQ ID NO: 153 or at least 91% identical to part of SEQ ID NO: 153. A targeted region may include a sequence at least 9′% identical to SEQ ID NO: 153 or at least 9′% identical to part of SEQ ID NO: 153.

[0056] A targeted region may include SEQ ID NO: 154. A targeted region may include part of SEQ ID NO: 154. A targeted region may include a sequence at least 99% identical to SEQ ID NO: 154 or at least 99% identical to part of SEQ ID NO: 154. A targeted region may include a sequence at least 98% identical to SEQ ID NO: 154 or at least 98% identical to part of SEQ ID NO: 154. A targeted region may include a sequence at least 97% identical to SEQ ID NO: 154 or at least 97% identical to part of SEQ ID NO: 154. A targeted region may include a sequence at least 96% identical to SEQ ID NO: 154 or at least 96% identical to part of SEQ ID NO: 154. A targeted region may include a sequence at least 95% identical to SEQ ID NO: 154 or at least 95% identical to part of SEQ ID NO: 154. A targeted region may include a sequence at least 94% identical to SEQ ID NO: 154 or at least 94% identical to part of SEQ ID NO: 154. A targeted region may include a sequence at least 93% identical to SEQ ID NO: 154 or at least 93% identical to part of SEQ ID NO: 154. A targeted region may include a sequence at least 92% identical to SEQ ID NO: 154 or at least 92% identical to part of SEQ ID NO: 154. A targeted region may include a sequence at least 91% identical to SEQ ID NO: 154 or at least 91% identical to part of SEQ ID NO: 154. A targeted region may include a sequence at least 9′% identical to SEQ ID NO: 154 or at least 9′% identical to part of SEQ ID NO: 154.

[0057] In some embodiments, the exon may include a nucleic acid sequence identical to SEQ ID NO: 1. In some embodiments, the exon may include a nucleic acid sequence at least 99% identical to SEQ ID NO: 1. In some embodiments, the exon may include a nucleic acid sequence at least 98% identical to SEQ ID NO: 1. In some embodiments, the exon may include a nucleic acid sequence at least 97% identical to SEQ ID NO: 1. In some embodiments, the exon may include a nucleic acid sequence at least 96% identical to SEQ ID NO: 1. In some embodiments, the exon may include a nucleic acid sequence at least 95% identical to SEQ ID NO: 1. In some embodiments, the exon may include a nucleic acid sequence at least 94% identical to SEQ ID NO: 1. In some embodiments, the exon may include a nucleic acid sequence at least 93% identical to SEQ ID NO: 1. In some embodiments, the exon may include a nucleic acid sequence at least 92% identical to SEQ ID NO: 1. In some embodiments, the exon may include a nucleic acid sequence at least 91% identical to SEQ ID NO: 1. In some embodiments, the exon may include a nucleic acid sequence at least 90% identical to SEQ ID NO: 1. In some embodiments, the exon may include a nucleic acid sequence at least 85% identical to SEQ ID NO: 1. In some embodiments, the exon may include a nucleic acid sequence at least 80% identical to SEQ ID NO: 1. In some embodiments, the exon may include a nucleic acid sequence at least 75% identical to SEQ ID NO: 1. In some embodiments, the exon may include a nucleic acid sequence of at least 70% identical to SEQ ID NO: 1.

[0058] In some embodiments, the exon may include a nucleic acid sequence identical to SEQ ID NO: 2. In some embodiments, the exon may include a nucleic acid sequence at least 99% identical to SEQ ID NO: 2. In some embodiments, the exon may include a nucleic acid sequence at least 98% identical to SEQ ID NO: 2. In some embodiments, the exon may include a nucleic acid sequence at least 97% identical to SEQ ID NO: 2. In some embodiments, the exon may include a nucleic acid sequence at least 96% identical to SEQ ID NO: 2. In some embodiments, the exon may include a nucleic acid sequence at least 95% identical to SEQ ID NO: 2. In some embodiments, the exon may include a nucleic acid sequence at least 94% identical to SEQ ID NO: 2. In some embodiments, the exon may include a nucleic acid sequence at least 93% identical to SEQ ID NO: 2. In some embodiments, the exon may include a nucleic acid sequence at least 92% identical to SEQ ID NO: 2. In some embodiments, the exon may include a nucleic acid sequence at least 91% identical to SEQ ID NO: 2. In some embodiments, the exon may include a nucleic acid sequence at least 90% identical to SEQ ID NO: 2. In some embodiments, the exon may include a nucleic acid sequence at least 85% identical to SEQ ID NO: 2. In some embodiments, the exon may include a nucleic acid sequence at least 80% identical to SEQ ID NO: 2. In some embodiments, the exon may include a nucleic acid sequence at least 75% identical to SEQ ID NO: 2. In some embodiments, the exon may include a nucleic acid sequence of at least 70% identical to SEQ ID NO: 2. A target nucleic acid sequence may target any of the aforementioned exon sequences. A target nucleic acid sequence may target a region of any of the aforementioned exon sequences.

[0059] A targeted region may be or comprise a length of nucleotides. For example, a targeted region may be about 10, about 15, about 20, about 25, about 30, about 35, about 40, about 45, about 50, about 60, about 70, about 80, about 90, about 100, about 110, about 120, about 130, about 140, or about 150 nucleotides in length, or a range of lengths defined by any 2 of the aforementioned lengths. In some embodiments, the length is at least 10 nucleotides. In some embodiments, the length is at least 15 nucleotides. In some embodiments, the length is at least 20 nucleotides. In some embodiments, the length is at least 25 nucleotides. In some embodiments, the length is at least 30 nucleotides. In some embodiments, the length is at least 35 nucleotides. In some embodiments, the length is at least 40 nucleotides. In some embodiments, the length is at least 45 nucleotides. In some embodiments, the length is at least 50 nucleotides. In some embodiments, the length is at least 60 nucleotides. In some embodiments, the length is at least 70 nucleotides. In some embodiments, the length is at least 80 nucleotides. In some embodiments, the length is at least 90 nucleotides. In some embodiments, the length is at least 100 nucleotides. In some embodiments, the length is at least 110 nucleotides. In some embodiments, the length is at least 120 nucleotides. In some embodiments, the length is at least 130 nucleotides. In some embodiments, the length is at least 140 nucleotides. In some embodiments, the length is at least 150 nucleotides. In some embodiments, the length is less than 15 nucleotides. In some embodiments, the length is less than 20 nucleotides. In some embodiments, the length is less than 25 nucleotides. In some embodiments, the length is less than 30 nucleotides. In some embodiments, the length is less than 35 nucleotides. In some embodiments, the length is less than 40 nucleotides. In some embodiments, the length is less than 45 nucleotides. In some embodiments, the length is less than 50 nucleotides. In some embodiments, the length is less than 60 nucleotides. In some embodiments, the length is less than 70 nucleotides. In some embodiments, the length is less than 80 nucleotides. In some embodiments, the length is less than 90 nucleotides. In some embodiments, the length is less than 100 nucleotides. In some embodiments, the length is less than 110 nucleotides. In some embodiments, the length is less than 120 nucleotides. In some embodiments, the length is less than 130 nucleotides. In some embodiments, the length is less than 140 nucleotides. In some embodiments, the length is less than 150 nucleotides.

[0060] In some embodiments, an antisense nucleic acid sequence binds a specific region of a target RNA such as an SCN1A RNA. In some embodiments, the targeted region is within an exon of an endogenous target RNA such as endogenous SCN1A RNA. In some embodiments, the targeted region is within an exon of an endogenous target RNA such as an SCN1A mRNA. In some embodiments, an antisense nucleic acid sequence targets an alternatively spliced exon of the endogenous target RNA such as SCN1A RNA. In some embodiments, the alternatively spliced exon includes an exon 20N of an SCN1A RNA.

[0061] In some embodiments, the targeted region is within a 5′ half or 5′ end of an intron or exon of the endogenous target RNA such as SCN1A RNA. For example, in some embodiments, the targeted region may be closer to the 5′ end of an intron of the endogenous target RNA. In some embodiments, the targeted region includes the 5′ end of an intron of the endogenous target RNA. In some embodiments, the targeted region may be closer to the 5′ end of an exon of the endogenous target RNA. In some embodiments, the targeted region includes the 5′ end of an exon of the endogenous target RNA.

[0062] In some embodiments, the targeted region is within a 3′ half or 3′ end of an intron or exon of the endogenous target RNA such as an endogenous SCN1A RNA. For example, in some embodiments, the targeted region may be closer to the 3′ end of an intron of the endogenous target RNA. In some embodiments, the targeted region includes the 3′ end of an intron of the endogenous target RNA. In some embodiments, the targeted region may be closer to the 3′ end of an exon of the endogenous target RNA. In some embodiments, the targeted region includes the 3′ end of an exon of the endogenous target RNA.

[0063] In some embodiments, the targeted region is within 100 nucleotides of an intron/exon junction. In some embodiments, the targeted region is within 10, 20, 30, 40, 50, 60, 70, 80, 90, or 100 nucleotides of an intron/exon junction. In some embodiments, the targeted region is not within 10, 20, 30, 40, 50, 60, 70, 80, 90, or 100 nucleotides of an intron/exon junction.

[0064] In some embodiments, the targeted region of the endogenous target RNA such as the endogenous SCN1A RNA (e.g. SCN1A mRNA or pre-mRNA) includes an intron-exon junction of the endogenous RNA. The intron-exon junction refers to the boundary between an intron and exon and includes the splice site that separates the intron and the exon upon pre-mRNA splicing. In some embodiments, the targeted region of the endogenous target RNA is within 0 nt and 150 nt of an intron-exon junction. In some embodiments, the targeted region of the endogenous target RNA is within 10 nt and 150 nt of an intron-exon junction. In some embodiments, the targeted region of the endogenous target RNA is within 20 nt and 150 nt of an intron-exon junction. In some embodiments, the targeted region of the endogenous target RNA is within 30 nt and 150 nt of an intron-exon junction. In some embodiments, the targeted region of the endogenous target RNA is within 40 nt and 150 nt of an intron-exon junction. In some embodiments, the targeted region of the endogenous target RNA is within 40 nt and 150 nt of an intron-exon junction. In some embodiments, the targeted region of the endogenous target RNA is within 60 nt and 150 nt of an intron-exon junction. In some embodiments, the targeted region of the endogenous target RNA is within 70 nt and 150 nt of an intron-exon junction. In some embodiments, the targeted region of the endogenous target RNA is within 80 nt and 150 nt of an intron-exon junction. In some embodiments, the targeted region of the endogenous target RNA is within 90 nt and 150 nt of an intron-exon junction. In some embodiments, the targeted region of the endogenous target RNA is within 100 nt and 150 nt of an intron-exon junction. In some embodiments, the targeted region of the endogenous target RNA is within 110 nt and 150 nt of an intron-exon junction. In some embodiments, the targeted region of the endogenous target RNA is within 120 nt and 150 nt of an intron-exon junction. In some embodiments, the targeted region of the endogenous target RNA is within 130 nt and 150 nt of an intron-exon junction. In some embodiments, the targeted region of the endogenous target RNA is within 140 nt and 150 nt of an intron-exon junction.

[0065] In some embodiments, the targeted region of the endogenous target RNA such as the endogenous SCN1A RNA is within 0 nt and 140 nt of an intron-exon junction. In some embodiments, the targeted region of the endogenous target RNA is within 0 nt and 130 nt of an intron-exon junction. In some embodiments, the targeted region of the endogenous target RNA is within 0 nt and 120 nt of an intron-exon junction. In some embodiments, the targeted region of the endogenous target RNA is within 0 nt and 110 nt of an intron-exon junction. In some embodiments, the targeted region of the endogenous target RNA is within 0 nt and 100 nt of an intron-exon junction. In some embodiments, the targeted region of the endogenous target RNA is within 0 nt and 90 nt of an intron-exon junction. In some embodiments, the targeted region of the endogenous target RNA is within 0 nt and 80 nt of an intron-exon junction. In some embodiments, the targeted region of the endogenous target RNA is within 0 nt and 70 nt of an intron-exon junction. In some embodiments, the targeted region of the endogenous target RNA is within 0 nt and 60 nt of an intron-exon junction. In some embodiments, the targeted region of the endogenous target RNA is within 0 nt and 50 nt of an intron-exon junction. In some embodiments, the targeted region of the endogenous target RNA is within 0 nt and 40 nt of an intron-exon junction. In some embodiments, the targeted region of the endogenous target RNA is within 0 nt and 30 nt of an intron-exon junction. In some embodiments, the targeted region of the endogenous target RNA is within 0 nt and 20 nt of an intron-exon junction.

[0066] In some embodiments, the targeted region of the endogenous target RNA is within 0 nt, 10 nt, 20 nt, 30 nt, 40 nt, 50 nt, 60 nt, 70 nt, 80 nt, 90 nt, 100 nt, 110 nt, 120 nt, 130 nt, 140 nt, or 150 of an intron-exon junction. In some embodiments, the targeted region of the endogenous target RNA includes an intro-exon junction.

[0067] A target RNA may be or include a target mRNA. A target mRNA may be or include an target pre-mRNA. For example, a target RNA may include a target pre-mRNA. A SCN1A RNA may be or include an SCN1A mRNA. An SCN1A mRNA may be or include an SCN1A pre-mRNA. For example, a target SCN1A RNA may include a SCN1A pre-mRNA. A pre-mRNA may include an mRNA before splicing, or before splicing is completed. Whan an mRNA has fully undergone splicing, it may be referred to as a mature mRNA.

[0068] Described herein, in some embodiments, are methods or systems that affect splicing of a target RNA such as an SCN1A RNA. In some embodiments, the target RNA comprises a mammalian target RNA. In some embodiments, the target RNA comprises a primate target RNA. In some embodiments, the target RNA comprises a human target RNA. In some embodiments, the target RNA comprises a rodent or mouse target RNA.

[0069] Some embodiments relate to a sodium channel protein type 1 subunit alpha (SCN1A) protein. For example, a method may be directed at reducing or preventing inclusion of a non-productive exon in a mature SCN1A mRNA, where inclusion of the non-productive exon results in nonsense-mediated decay (NMD). Some examples of SCN1A protein sequences are included at UniProt.org under accession numbers P35498 (human) and A2APX8 (mouse), as last updated as of the effective filing date. The SCN1A protein may include the amino acid sequence of SEQ ID NO: 155, which includes the sequence found at UniProt P35498-1 (human SCN1A protein). An SCN1A protein may include an amino acid sequence at least 85%, at least 90%, at least 91%, at least 92%, at least 93%, at least 94%, at least 95%, at least 96%, at least 97%, at least 98%, or at least 99% identical to SEQ ID NO: 155.

Modified U7 snRNAs

[0070] Disclosed herein, in some embodiments, are recombinant small nuclear RNAs (snRNAs) or snRNA sequences. Disclosed herein, in some embodiments, are modified or recombinant U7 small nuclear RNAs (snRNAs) or modified or recombinant U7 snRNA sequences. A modified or recombinant U7 snRNA, or a modified or recombinant U7 snRNA sequence may be included as part of a system, or may be used in a method herein. Disclosed herein, in some embodiments, are systems that include a modified or recombinant U7 snRNA or that include a modified or recombinant U7 snRNA sequence. The modified or recombinant U7 snRNA may be or include an engineered U7 snRNA. Terms such as modified, recombinant, and engineered may be used interchangeably herein. The U7 snRNA sequence may be useful for modifying nucleic acid splicing. In some embodiments, the U7 snRNA sequence may include an exonic splicing silencer (ESS) nucleic acid sequence that enhances splicing suppression. Some embodiments do not include an ESS nucleic acid sequence. In some embodiments, the U7 snRNA sequence may include an antisense nucleic acid sequence that targets an alternatively spliced region of a ribonucleic acid (RNA). In some embodiments, the targeted RNA may encode a sodium channel protein type 1 subunit alpha (SCN1A) protein. In some embodiments, the targeted RNA may encode a sodium channel protein type 2 subunit alpha (SCN2A) protein. The U7 snRNA sequence may include a smOPT sequence. The U7 snRNA sequence may include a hairpin.

[0071] Described herein, in some embodiments, is a nucleic acid system that may include one or more RNA molecules. In some embodiments, the system may include at least one RNA molecule. In some embodiments, the system may include at least two RNA molecules. In some embodiments, the system may include at least three RNA molecules. In some embodiments, the system may include at least four RNA molecules. In some embodiments, the system may include at least five RNA molecules. In some embodiments, the system may include at most one RNA molecule. In some embodiments, the system may include at most two RNA molecules. In some embodiments, the system may include at most three RNA molecules. In some embodiments, the system may include at most four RNA molecules. In some embodiments, the system may include at most five RNA molecules.

[0072] In some embodiments, the RNA may be a modified U7 snRNA. Some U rich small nuclear ribonucleoproteins (snRNPs) include complexes that mediate the splicing of pre-mRNAs. U7 snRNP may be an exception in not being involved in splicing but may be a key factor in 3′ end processing of replication-dependent histone mRNAs. However, by introducing controlled changes in the U7 snRNA histone binding sequence and in the Sm motif, U7 can be used as an effective tool for gene therapy. The modified U7 snRNP may thus be not involved in processing of replication-dependent histone pre-mRNA but instead target splicing by inducing efficient skipping or inclusion of selected exons. Modification of the sequence motif of U7 snRNA can make the snRNP particle hybridize to almost any RNA sequence within the nucleoplasm.

[0073] A modified U7 snRNA may include, in the following order from 5′ to 3′: (1) an optional exonic splicing silencer, (2) a targeting sequence (e.g. an antisense sequence) complementary to a region of a target mRNA, (4) a smOPT sequence, and (5) a hairpin sequence.

[0074] In some embodiments, a modified U7 snRNA includes a U7 core sequence, or an aspect of a U7 core sequence. In some embodiments, a recombinant U7 snRNA includes a U7 core sequence, or an aspect of a U7 core sequence. An example of a U7 core sequence is included in Table 1. For the U7 core sequence shown in Table 1, an antisense sequence is in parentheses, a smOPT is in in upper case, and a hairpin is in brackets. The U7 core sequence may also include an ESS sequence at its 5′ terminus. The antisense sequence may be or include a targeting sequence herein.

TABLE 1

| | | SEQ |
|---|---|---|
| | | ID |
| Component | Sequence (5′ to 3′) | NO: |
| Mouse Exon | GATAATCTTGCTCCAACTTGGATGGGGTGGAG | 1 |
| 21N | CGGTGGTTCCTCCCCTCAGCCCTTTATTATGG | |
| Human Exon | GATAATCTTGCTCCAACTTGGATGGGGTGGAG | 2 |
| 20N | CGCTGGTTCCTCCCCTGAGCCCTTTATTATGG | |
| U7 Core | a(N . . . N)AATTTTTGGAG[caggtttt | 3 |
| Sequence | ctgacttcggtcggaaaacccct] | |
| U7 Hairpin | CAGGUUUUCUGACUUCGGUCGGAAAACCCCU | 4 |
| Sequence | | |

[0075] Some embodiments include a modified U7 small nuclear RNA (snRNA). In some embodiments, the modified U7 snRNA includes a U7 core sequence at least 80% identical to a U7 core sequence set forth in Table 1. In some embodiments, the modified U7 snRNA includes a U7 core sequence at least 85% identical to a U7 core sequence set forth in Table 1. In some embodiments, the modified U7 snRNA includes a U7 core sequence at least 90% identical to a U7 core sequence set forth in Table 1. In some embodiments, the modified U7 snRNA includes a U7 core sequence at least 91% identical to a U7 core sequence set forth in Table 1. In some embodiments, the modified U7 snRNA includes a U7 core sequence at least 92% identical to a U7 core sequence set forth in Table 1. In some embodiments, the modified U7 snRNA includes a U7 core sequence at least 93% identical to a U7 core sequence set forth in Table 1. In some embodiments, the modified U7 snRNA includes a U7 core sequence at least 94% identical to a U7 core sequence set forth in Table 1. In some embodiments, the modified U7 snRNA includes a U7 core sequence at least 95% identical to a U7 core sequence set forth in Table 1. In some embodiments, the modified U7 snRNA includes a U7 core sequence at least 96% identical to a U7 core sequence set forth in Table 1. In some embodiments, the modified U7 snRNA includes a U7 core sequence at least 97% identical to a U7 core sequence set forth in Table 1. In some embodiments, the modified U7 snRNA includes a U7 core sequence at least 98% identical to a U7 core sequence set forth in Table 1. In some embodiments, the modified U7 snRNA includes a U7 core sequence at least 99% identical to a U7 core sequence set forth in Table 1. In some embodiments, the modified U7 snRNA includes a U7 core sequence set forth in Table 1. In some embodiments, the modified U7 snRNA is a U7 core sequence set forth in Table 1.

[0076] Some embodiments include a modified U7 small nuclear RNA (snRNA). Some examples of sequences of modified U7 snRNAs are in Table 14A. In some embodiments, the modified U7 snRNA is or includes an RNA sequence at least 80% identical to an RNA sequence set forth in Table 14A. In some embodiments, the modified U7 snRNA is or includes an RNA sequence at least 85% identical to an RNA sequence set forth in Table 14A. In some embodiments, the modified U7 snRNA is or includes an RNA sequence at least 90% identical to an RNA sequence set forth in Table 14A. In some embodiments, the modified U7 snRNA is or includes an RNA sequence at least 91% identical to an RNA sequence set forth in Table 14A. In some embodiments, the modified U7 snRNA is or includes an RNA sequence at least 92% identical to an RNA sequence set forth in Table 14A. In some embodiments, the modified U7 snRNA is or includes an RNA sequence at least 93% identical to an RNA sequence set forth in Table 14A. In some embodiments, the modified U7 snRNA is or includes an RNA sequence at least 94% identical to an RNA sequence set forth in Table 14A. In some embodiments, the modified U7 snRNA is or includes an RNA sequence at least 95% identical to an RNA sequence set forth in Table 14A. In some embodiments, the modified U7 snRNA is or includes an RNA sequence at least 96% identical to an RNA sequence set forth in Table 14A. In some embodiments, the modified U7 snRNA is or includes an RNA sequence at least 97% identical to an RNA sequence set forth in Table 14A. In some embodiments, the modified U7 snRNA is or includes an RNA sequence at least 98% identical to an RNA sequence set forth in Table 14A. In some embodiments, the modified U7 snRNA is or includes an RNA sequence at least 99% identical to an RNA sequence set forth in Table 14A. In some embodiments, the modified U7 snRNA is or includes an RNA sequence set forth in Table 14A. In some embodiments, the modified U7 snRNA is an RNA sequence set forth in Table 14A.

[0077] Some examples of sequences of modified U7 snRNAs are in Table 14B. In some embodiments, the modified U7 snRNA is or includes an RNA sequence at least 80% identical to an RNA sequence set forth in Table 14B. In some embodiments, the modified U7 snRNA is or includes an RNA sequence at least 85% identical to an RNA sequence set forth in Table 14B. In some embodiments, the modified U7 snRNA is or includes an RNA sequence at least 90% identical to an RNA sequence set forth in Table 14B. In some embodiments, the modified U7 snRNA is or includes an RNA sequence at least 91% identical to an RNA sequence set forth in Table 14B. In some embodiments, the modified U7 snRNA is or includes an RNA sequence at least 92% identical to an RNA sequence set forth in Table 14B. In some embodiments, the modified U7 snRNA is or includes an RNA sequence at least 93% identical to an RNA sequence set forth in Table 14B. In some embodiments, the modified U7 snRNA is or includes an RNA sequence at least 94% identical to an RNA sequence set forth in Table 14B. In some embodiments, the modified U7 snRNA is or includes an RNA sequence at least 95% identical to an RNA sequence set forth in Table 14B. In some embodiments, the modified U7 snRNA is or includes an RNA sequence at least 96% identical to an RNA sequence set forth in Table 14B. In some embodiments, the modified U7 snRNA is or includes an RNA sequence at least 97% identical to an RNA sequence set forth in Table 14B. In some embodiments, the modified U7 snRNA is or includes an RNA sequence at least 98% identical to an RNA sequence set forth in Table 14B. In some embodiments, the modified U7 snRNA is or includes an RNA sequence at least 99% identical to an RNA sequence set forth in Table 14B. In some embodiments, the modified U7 snRNA is or includes an RNA sequence set forth in Table 14B. In some embodiments, the modified U7 snRNA is an RNA sequence set forth in Table 14B.

[0078] Some examples of sequences of modified U7 snRNAs are in Table 14C. In some embodiments, the modified U7 snRNA is or includes an RNA sequence at least 80% identical to an RNA sequence set forth in Table 14C. In some embodiments, the modified U7 snRNA is or includes an RNA sequence at least 85% identical to an RNA sequence set forth in Table 14C. In some embodiments, the modified U7 snRNA is or includes an RNA sequence at least 90% identical to an RNA sequence set forth in Table 14C. In some embodiments, the modified U7 snRNA is or includes an RNA sequence at least 91% identical to an RNA sequence set forth in Table 14C. In some embodiments, the modified U7 snRNA is or includes an RNA sequence at least 92% identical to an RNA sequence set forth in Table 14C. In some embodiments, the modified U7 snRNA is or includes an RNA sequence at least 93% identical to an RNA sequence set forth in Table 14C. In some embodiments, the modified U7 snRNA is or includes an RNA sequence at least 94% identical to an RNA sequence set forth in Table 14C. In some embodiments, the modified U7 snRNA is or includes an RNA sequence at least 95% identical to an RNA sequence set forth in Table 14C. In some embodiments, the modified U7 snRNA is or includes an RNA sequence at least 96% identical to an RNA sequence set forth in Table 14C. In some embodiments, the modified U7 snRNA is or includes an RNA sequence at least 97% identical to an RNA sequence set forth in Table 14C. In some embodiments, the modified U7 snRNA is or includes an RNA sequence at least 98% identical to an RNA sequence set forth in Table 14C. In some embodiments, the modified U7 snRNA is or includes an RNA sequence at least 99% identical to an RNA sequence set forth in Table 14C. In some embodiments, the modified U7 snRNA is or includes an RNA sequence set forth in Table 14C. In some embodiments, the modified U7 snRNA is an RNA sequence set forth in Table 14C.

[0079] In some embodiments, the system reduces a nonsense-mediated decay (NMD) exon measurement (e.g. an exon 20N measurement) in a cell or population of cells by at least 5%, at least 10%, at least 15%, at least 20%, at least 25%, at least 30%, at least 35%, at least 40%, at least 45%, at least 50%, at least 55%, at least 60%, at least 65%, at least 70%, at least 75%, at least 80%, at least 85%, at least 90%, or at least 95%, relative to a baseline target measurement. In some embodiments, expression of the system in a cell or a population of cells reduces an exon 20N measurement in a cell or population of cells by at least 10%, at least 20%, at least 30%, at least 40%, at least 50%, at least 60%, at least 70%, at least 80%, or at least 90%, relative to a baseline exon 20N measurement. In some embodiments, the system reduces a nonsense-mediated decay (NMD) exon measurement (e.g. an exon 20N measurement) in a cell or population of cells by less than 5%, less than 10%, less than 15%, less than 20%, less than 25%, less than 30%, less than 35%, less than 40%, less than 45%, less than 50%, less than 55%, less than 60%, less than 65%, less than 70%, less than 75%, less than 80%, less than 85%, less than 90%, or less than 95%, relative to a baseline target measurement.

[0080] In some embodiments, the system reduces a nonsense-mediated decay (NMD) transcript measurement (e.g. an NMD SCN1A RNA measurement) in a cell or population of cells by at least 5%, at least 10%, at least 15%, at least 20%, at least 25%, at least 30%, at least 35%, at least 40%, at least 45%, at least 50%, at least 55%, at least 60%, at least 65%, at least 70%, at least 75%, at least 80%, at least 85%, at least 90%, or at least 95%, relative to a baseline target measurement. In some embodiments, expression of the system in a cell or a population of cells increases a productive form of an SCN1A transcript measurement in a cell or population of cells by at least 10%, at least 20%, at least 30%, at least 40%, at least 50%, at least 60%, at least 70%, at least 80%, or at least 90%, relative to a baseline SCN1A transcript measurement. In some embodiments, expression of the system in a cell or a population of cells increases a productive form of an SCN1A transcript measurement in a cell or population of cells by more than 70%, relative to a baseline SCN1A transcript measurement. In some embodiments, the system reduces a nonsense-mediated decay (NMD) transcript measurement (e.g. an NMD SCN1A RNA measurement) in a cell or population of cells by less than 5%, less than 10%, less than 15%, less than 20%, less than 25%, less than 30%, less than 35%, less than 40%, less than 45%, less than 50%, less than 55%, less than 60%, less than 65%, less than 70%, less than 75%, less than 80%, less than 85%, less than 90%, or less than 95%, relative to a baseline target measurement.

[0081] In some embodiments, expression of the system in a cell or a population of cells an TARGET protein measurement in a cell or population of cells by at least 10%, at least 20%, at least 30%, at least 40%, at least 50%, at least 60%, at least 70%, at least 80%, or at least 90%, relative to a baseline TARGET protein measurement. In some embodiments, expression of the system in a cell or a population of cells an TARGET protein measurement in a cell or population of cells by at least 70%, relative to a baseline TARGET protein measurement. In some embodiments, expression of the system in a cell or a population of cells an SCN1A protein measurement in a cell or population of cells by at least 10%, at least 20%, at least 30%, at least 40%, at least 50%, at least 60%, at least 70%, at least 80%, or at least 90%, relative to a baseline SCN1A protein measurement. In some embodiments, expression of the system in a cell or a population of cells an SCN1A protein measurement in a cell or population of cells by at least 70%, relative to a baseline SCN1A protein measurement. In some embodiments, expression of the system in a cell or a population of cells an target protein measurement in a cell or population of cells by less than 10%, less than 20%, less than 30%, less than 40%, less than 50%, less than 60%, less than 70%, less than 80%, or less than 90%, relative to a baseline target protein measurement. In some embodiments, expression of the system in a cell or a population of cells an target protein measurement in a cell or population of cells by less than 70%, relative to a baseline target protein measurement.

[0082] Disclosed herein, in some embodiments, are polynucleotides, comprising: an exonic splicing silencer (ESS) nucleic acid sequence; and an antisense nucleic acid sequence that binds to an alternatively spliced region of a ribonucleic acid (RNA) encoding sodium channel protein type 1 subunit alpha (SCN1A). In some embodiments, the ESS nucleic acid sequence comprises a sequence having at least 80%, at least 85%, at least 90%, at least 95%, at least 98%, at least 99%, or 100% identity to any one of SEQ ID NOs: 11-13, optionally wherein the ESS nucleic acid sequence comprises the nucleic acid sequence of any one of SEQ ID NOs: 11-13. In some embodiments, the antisense nucleic acid sequence comprises a sequence having at least 80%, at least 85%, at least 90%, at least 95%, at least 98%, at least 99%, or 100% identity to any one of SEQ ID NOs: 14 and 18-104, optionally wherein the antisense nucleic acid sequence comprises the nucleic acid sequence of any one of SEQ ID NOs: 14 and 18-104. In some embodiments, the polynucleotide further comprises a Sm binding site. In some embodiments, the Sm binding site comprises a nucleic acid sequence having at least 80%, at least 85%, at least 90%, at least 95%, at least 98%, at least 99%, or 100% identity to the nucleic acid sequence of any one of SEQ ID NOs: 150-151, optionally wherein the Sm binding site comprises the nucleic acid sequence of any one of SEQ ID NOs: 150-151. In some embodiments, the polynucleotide further comprises a hairpin sequence. In some embodiments, the hairpin sequence comprises a nucleic acid sequence having at least 80%, at least 85%, at least 90%, at least 95%, at least 98%, at least 99%, or 100% identity to the nucleic acid sequence of SEQ ID NO: 4, optionally wherein the hairpin sequence comprises the nucleic acid sequence of SEQ ID NO: 4. In some embodiments, the polynucleotide comprising a nucleic acid sequence having at least 80%, at least 85%, at least 90%, at least 95%, at least 98%, at least 99%, or 100% identity to the nucleic acid sequence of any one of SEQ ID NOs: 364-566.

[0083] Disclosed herein, in some embodiments, are polynucleotides, comprising: a first sequence comprising a nucleic acid sequence having at least 80%, at least 85%, at least 90%, at least 95%, at least 98%, at least 99%, or 100% identity to any one of SEQ ID NOs: 11-13; and a second sequence comprising a nucleic acid sequence having at least 80%, at least 85%, at least 90%, at least 95%, at least 98%, at least 99%, or 100% identity to any one of SEQ ID NOs: 14 and 18-104. In some embodiments, the first sequence comprises the nucleic acid sequence of any one of SEQ ID NOs: 11-13. In some embodiments, the second sequence comprises the nucleic acid sequence of any one of SEQ ID NOs: 14 and 18-104. In some embodiments, the polynucleotide further a third sequence, wherein the third sequence comprises a nucleic acid sequence having at least 80%, at least 85%, at least 90%, at least 95%, at least 98%, at least 99%, or 100% identity to the nucleic acid sequence of any one of SEQ ID NOs: 150-151, optionally wherein the third sequence comprises the nucleic acid sequence of any one of SEQ ID NOs: 150-151. In some embodiments, the polynucleotide further comprises a fourth sequence, wherein the fourth sequence comprises a nucleic acid sequence having at least 80%, at least 85%, at least 90%, at least 95%, at least 98%, at least 99%, or 100% identity to the nucleic acid sequence of SEQ ID NO: 4, optionally wherein the fourth sequence comprises the nucleic acid sequence of SEQ ID NO: 4. In some embodiments, the polynucleotide comprising a nucleic acid sequence having at least 90% identity to the nucleic acid sequence of any one of SEQ ID NOs: 364-566.

[0084] Disclosed herein, in some embodiments, are RNA polynucleotides, comprising a nucleic acid sequence having at least 80%, at least 85%, at least 90%, at least 95%, at least 98%, at least 99%, or 100% identity to the nucleic acid sequence of any one of SEQ ID NOs: 364-566.

### ESS Sequences

[0085] Described herein, in some embodiments, are exonic splicing silencer (ESS) sequences. An ESS may be or include a 10-20 nt sequence at a 5′ terminus of an snRNA (e.g. engineered snRNA) capable of enhancing splicing suppression. The ESS may be included in a modified or recombinant snRNA or U7 snRNA. The ESS may recruit a protein factor that reduces splicing of a target RNA. The ESS may recruit a protein factor that reduces splicing of the RNA encoding an SCN1A protein. An ESS sequence may refer to an ESS or to a sequence that encodes an ESS. An ESS may include a short region of an exon and be a cis-regulatory element (CREs). CREs are regions of non-coding DNA which regulate transcription of neighboring genes. CREs may include components of genetic regulatory networks that control the timing and the amount that a specific gene is expressed. An ESS may be bound by a negatively acting factor such as a heterogeneous ribonucleoprotein (hnRNP).

[0086] ESSs may work by inhibiting the splicing of pre-mRNA transcripts or promoting exon skipping. In some embodiments, the ESS may recruit a protein factor that silences splicing of a target RNA such as an RNA encoding an SCN1A protein. In some embodiments, the ESS may recruit a group of factors that reduce splicing of the target RNA. In some embodiments, the ESS may recruit a group of factors that silence splicing of the RNA encoding an SCN1A protein.

[0087] In some embodiments, the ESS may be about 20 nucleotides long. In some embodiments, the ESS may be at least 4 nucleotides long. In some embodiments, the ESS may be at least 5 nucleotides long. In some embodiments, the ESS may be at least 6 nucleotides long. In some embodiments, the ESS may be at least 7 nucleotides long. In some embodiments, the ESS may be at least 8 nucleotides long. In some embodiments, the ESS may be at least 9 nucleotides long. In some embodiments, the ESS may be at least 10 nucleotides long. In some embodiments, the ESS may be at least 11 nucleotides long. In some embodiments, the ESS may be at least 12 nucleotides long. In some embodiments, the ESS may be at least 13 nucleotides long. In some embodiments, the ESS may be at least 14 nucleotides long. In some embodiments, the ESS may be at least 15 nucleotides long. In some embodiments, the ESS may be at least 16 nucleotides long. In some embodiments, the ESS may be at least 17 nucleotides long. In some embodiments, the ESS may be at least 18 nucleotides long. In some embodiments, the ESS may be at least 19 nucleotides long. In some embodiments, the ESS may be at least 20 nucleotides long.

[0088] In some embodiments, the ESS nucleic acid sequence may include a nucleic acid sequence at least 90% identical to an ESS nucleic acid sequence in Tables 2A-2B. In some embodiments, the ESS nucleic acid sequence may include a nucleic acid sequence at least 99% identical to an ESS nucleic acid sequence in Tables 2A-2B. In some embodiments, the ESS nucleic acid sequence may include a nucleic acid sequence at least 98% identical to an ESS nucleic acid sequence in Tables 2A-2B. In some embodiments, the ESS nucleic acid sequence may include a nucleic acid sequence at least 97% identical to an ESS nucleic acid sequence in Tables 2A-2B. In some embodiments, the ESS nucleic acid sequence may include a nucleic acid sequence at least 96% identical to an ESS nucleic acid sequence in Tables 2A-2B. In some embodiments, the ESS nucleic acid sequence may include a nucleic acid sequence at least 95% identical to an ESS nucleic acid sequence in Tables 2A-2B. In some embodiments, the ESS nucleic acid sequence may include a nucleic acid sequence at least 94% identical to an ESS nucleic acid sequence in Tables 2A-2B. In some embodiments, the ESS nucleic acid sequence may include a nucleic acid sequence at least 93% identical to an ESS nucleic acid sequence in Tables 2A-2B. In some embodiments, the ESS nucleic acid sequence may include a nucleic acid sequence at least 92% identical to an ESS nucleic acid sequence in Tables 2A-2B. In some embodiments, the ESS nucleic acid sequence may include a nucleic acid sequence at least 91% identical to an ESS nucleic acid sequence in Tables 2A-2B. In some embodiments, the ESS nucleic acid sequence may include a nucleic acid sequence at least 90% identical to an ESS nucleic acid sequence in Tables 2A-2B. In some embodiments, the ESS nucleic acid sequence may include a nucleic acid sequence at least 85% identical to an ESS nucleic acid sequence in Tables 2A-2B. In some embodiments, the ESS nucleic acid sequence may include a nucleic acid sequence at least 80% identical to an ESS nucleic acid sequence in Tables 2A-2B. In some embodiments, the ESS nucleic acid sequence may include a nucleic acid sequence at least 75% identical to an ESS nucleic acid sequence in Tables 2A-2B. In some embodiments, the ESS nucleic acid sequence may include a nucleic acid sequence at least 70% identical to an ESS nucleic acid sequence in Tables 2A-2B.

[0089] In some embodiments, the ESS nucleic acid sequence may be or include ATGATAGGGACTTAGGGTGA (SEQ ID NO: 11). In some embodiments, the ESS nucleic acid sequence may be or include TTTGTTCCGTGGGTGGTTTA (SEQ ID NO: 12). In some embodiments, the ESS nucleic acid sequence may be or include TGGGGGGAGGTAGGTAGGTA (SEQ ID NO: 13).

### ESE Sequences

[0090] Described here, in some embodiments, are exonic splicing enhancers (ESE). The ESE may be included in a modified or recombinant U7 snRNA. The ESE may recruit a protein factor that enhances splicing of a target RNA. Some embodiments include an ESE sequence that enhances splicing of an exon of an RNA encoding SCN1A. An ESE sequence may refer to an ESE or to a sequence that encodes an ESE. An ESE may include a short region of an exon and be a cis-regulatory element (CRE). ESEs may work by directing or promoting the splicing of pre-mRNA transcripts. In some embodiments, the ESE may recruit a protein factor that promotes splicing of a target RNA such as an RNA encoding SCN1A. In some embodiments, the ESE may recruit a group of factors that increase splicing of the target RNA. Exonic or intronic splicing enhancers may be or include cis-acting elements bound by positive transactive factors such as a nuclear phosphoprotein family that may include serine/arginine-rich proteins.

[0091] In some embodiments, the ESE may be about 20 nucleotides. In some embodiments, the ESE may be at least 4 nucleotides long. In some embodiments, the ESE may be at least 5 nucleotides long. In some embodiments, the ESE may be at least 6 nucleotides long. In some embodiments, the ESE may be at least 7 nucleotides long. In some embodiments, the ESE may be at least 8 nucleotides long. In some embodiments, the ESE may be at least 9 nucleotides long. In some embodiments, the ESE may be at least 10 nucleotides long. In some embodiments, the ESE may be at least 11 nucleotides long. In some embodiments, the ESE may be at least 12 nucleotides long. In some embodiments, the ESE may be at least 13 nucleotides long. In some embodiments, the ESE may be at least 14 nucleotides long. In some embodiments, the ESE may be at least 15 nucleotides long. In some embodiments, the ESE may be at least 16 nucleotides long. In some embodiments, the ESE may be at least 17 nucleotides long. In some embodiments, the ESE may be at least 18 nucleotides long. In some embodiments, the ESE may be at least 19 nucleotides long. In some embodiments, the ESE may be at least 20 nucleotides long.

### U7 Targeting Sequences

[0092] Described herein, in some embodiments, are targeting nucleic acid sequences such as snRNA targeting sequences or U7 targeting sequences. A targeting nucleic acid sequence may be or include an antisense nucleic acid sequence. A U7 targeting nucleic acid sequence may be or include a U7 antisense nucleic acid sequence. An snRNA targeting nucleic acid sequence may be or include a snRNA antisense nucleic acid sequence. Described herein, in some embodiments, are antisense nucleic acid sequences such as snRNA antisense sequences or U7 antisense sequences. An antisense sequence may be referred to as a targeting sequence. The antisense nucleic acid sequence may be included in a modified or recombinant snRNA or U7 snRNA. The antisense nucleic acid sequence may target (e.g. bind or be reverse complementary to) a target RNA such as an RNA encoding an SCN1A protein. The antisense nucleic acid sequence may bind to the target RNA. In some embodiments, an antisense nucleic acid sequence is encoded by a DNA sequence (e.g. a DNA expression construct). Targeting a target RNA may include binding or being reverse complementary to the target RNA.

[0093] Described herein, in some embodiments, is a system wherein the antisense nucleic acid sequence may be 10-60 nucleotides in length. Some U rich small nuclear ribonucleoproteins (snRNPs) are complexes that may mediate the splicing of pre-mRNAs. U7 snRNP may be an exception in being uninvolved in splicing but may be a factor in unique 3′ end processing of replication-dependent histone mRNAs. However, by introducing controlled changes in the U7 snRNA histone binding sequence and in the Sm motif, U7 can be used as an effective tool for gene therapy. in some embodiments, the modified U7 snRNP may not be uninvolved in processing of replication-dependent histone pre-mRNA, but target splicing by inducing efficient skipping or inclusion of selected exons. Modification of the sequence motif of U7 snRNA can make the snRNP particle hybridize to almost any RNA sequence within the nucleoplasm.

[0094] A targeting nucleic sequence is or include a length of nucleotides. In some embodiments, the targeting nucleic sequence is at least 10 nucleotides. In some embodiments, the targeting nucleic sequence is at least 11 nucleotides. In some embodiments, the targeting nucleic sequence is at least 12 nucleotides. In some embodiments, the targeting nucleic sequence is at least 13 nucleotides. In some embodiments, the targeting nucleic sequence is at least 14 nucleotides. In some embodiments, the targeting nucleic sequence is at least 15 nucleotides. In some embodiments, the targeting nucleic sequence is at least 16 nucleotides. In some embodiments, the targeting nucleic sequence is at least 17 nucleotides. In some embodiments, the targeting nucleic sequence is at least 18 nucleotides. In some embodiments, the targeting nucleic sequence is at least 19 nucleotides. In some embodiments, the targeting nucleic sequence is at least 20 nucleotides. In some embodiments, the targeting nucleic sequence is at least 22 nucleotides. In some embodiments, the targeting nucleic sequence is at least 24 nucleotides. In some embodiments, the targeting nucleic sequence is at least 26 nucleotides. In some embodiments, the targeting nucleic sequence is at least 28 nucleotides. In some embodiments, the targeting nucleic sequence is at least 30 nucleotides. In some embodiments, the targeting nucleic sequence is at least 32 nucleotides. In some embodiments, the targeting nucleic sequence is at least 34 nucleotides. In some embodiments, the targeting nucleic sequence is at least 36 nucleotides. In some embodiments, the targeting nucleic sequence is at least 38 nucleotides. In some embodiments, the targeting nucleic sequence is at least 40 nucleotides. In some embodiments, the targeting nucleic sequence is at least 45 nucleotides. In some embodiments, the targeting nucleic sequence is at least 50 nucleotides. In some embodiments, the targeting nucleic sequence is at least 55 nucleotides. In some embodiments, the targeting nucleic sequence is at least 60 nucleotides. In some embodiments, the targeting nucleic sequence is at least 65 nucleotides. In some embodiments, the targeting nucleic sequence is at least 70 nucleotides. In some embodiments, the targeting nucleic sequence is at least 75 nucleotides. In some embodiments, the targeting nucleic sequence is at least 80 nucleotides. In some embodiments, the targeting nucleic sequence is at least 85 nucleotides. In some embodiments, the targeting nucleic sequence is at least 90 nucleotides. In some embodiments, the targeting nucleic sequence is at least 95 nucleotides. In some embodiments, the targeting nucleic sequence is at least 100 nucleotides. In some embodiments, the targeting nucleic sequence is at least 125 nucleotides. In some embodiments, the targeting nucleic sequence is at least 150 nucleotides. In some embodiments, the targeting nucleic sequence is at least 175 nucleotides. In some embodiments, the targeting nucleic sequence is at least 200 nucleotides. In some embodiments, the targeting nucleic sequence is at least 225 nucleotides. In some embodiments, the targeting nucleic sequence is at least 250 nucleotides. In some embodiments, the targeting nucleic sequence is at most 10 nucleotides. In some embodiments, the targeting nucleic sequence is at most 11 nucleotides. In some embodiments, the targeting nucleic sequence is at most 12 nucleotides. In some embodiments, the targeting nucleic sequence is at most 13 nucleotides. In some embodiments, the targeting nucleic sequence is at most 14 nucleotides. In some embodiments, the targeting nucleic sequence is at most 15 nucleotides. In some embodiments, the targeting nucleic sequence is at most 16 nucleotides. In some embodiments, the targeting nucleic sequence is at most 17 nucleotides. In some embodiments, the targeting nucleic sequence is at most 18 nucleotides. In some embodiments, the targeting nucleic sequence is at most 19 nucleotides. In some embodiments, the targeting nucleic sequence is at most 20 nucleotides. In some embodiments, the targeting nucleic sequence is at most 22 nucleotides. In some embodiments, the targeting nucleic sequence is at most 24 nucleotides. In some embodiments, the targeting nucleic sequence is at most 26 nucleotides. In some embodiments, the targeting nucleic sequence is at most 28 nucleotides. In some embodiments, the targeting nucleic sequence is at most 30 nucleotides. In some embodiments, the targeting nucleic sequence is at most 32 nucleotides. In some embodiments, the targeting nucleic sequence is at most 34 nucleotides. In some embodiments, the targeting nucleic sequence is at most 36 nucleotides. In some embodiments, the targeting nucleic sequence is at most 38 nucleotides. In some embodiments, the targeting nucleic sequence is at most 40 nucleotides. In some embodiments, the targeting nucleic sequence is at most 45 nucleotides. In some embodiments, the targeting nucleic sequence is at most 50 nucleotides. In some embodiments, the targeting nucleic sequence is at most 55 nucleotides. In some embodiments, the targeting nucleic sequence is at most 60 nucleotides. In some embodiments, the targeting nucleic sequence is at most 65 nucleotides. In some embodiments, the targeting nucleic sequence is at most 70 nucleotides. In some embodiments, the targeting nucleic sequence is at most 75 nucleotides. In some embodiments, the targeting nucleic sequence is at most 80 nucleotides. In some embodiments, the targeting nucleic sequence is at most 85 nucleotides. In some embodiments, the targeting nucleic sequence is at most 90 nucleotides. In some embodiments, the targeting nucleic sequence is at most 95 nucleotides. In some embodiments, the targeting nucleic sequence is at most 100 nucleotides. In some embodiments, the targeting nucleic sequence is at most 125 nucleotides. In some embodiments, the targeting nucleic sequence is at most 150 nucleotides. In some embodiments, the targeting nucleic sequence is at most 175 nucleotides. In some embodiments, the targeting nucleic sequence is at most 200 nucleotides. In some embodiments, the targeting nucleic sequence is at most 225 nucleotides. In some embodiments, the targeting nucleic sequence is at most 250 nucleotides. The antisense nucleic acid sequence may, in some embodiments, include a length defined by a range of any two of the aforementioned numbers of nucleotides.

[0095] In some embodiments, the antisense nucleic acid sequence binds an alternatively spliced region. The alternatively spliced region may be or include exon 20N, which is an example of a target RNA sequence. In some embodiments, the antisense nucleic acid sequence may bind to the alternatively spliced region at the 5′ end of the nucleic acid. In some embodiments, the antisense nucleic acid sequence binds to the alternatively spliced region at the 3′ end of the nucleic acid. In some embodiments, the antisense nucleic acid sequence bind to the alternatively spliced region in between the 5′ and 3′ ends of the target RNA.

[0096] An antisense nucleic acid sequence may hybridize or bind to a target RNA. In some embodiments, the antisense nucleic acid sequence is fully reverse complementary to a portion of the target RNA. In some embodiments, the antisense nucleic acid sequence is partially reverse complementary (e.g. at least 80% reverse complementary or at least 90% reverse complementary) to a portion of the target RNA. In some embodiments, the targeting nucleic acid is at least 99% reverse complementary to a portion of the target RNA. In some embodiments, the targeting nucleic acid is at least 98% reverse complementary to a portion of the target RNA. In some embodiments, the targeting nucleic acid is at least 97% reverse complementary to a portion of the target RNA. In some embodiments, the targeting nucleic acid is at least 96% reverse complementary to a portion of the target RNA. In some embodiments, the targeting nucleic acid is at least 95% reverse complementary to a portion of the target RNA. In some embodiments, the targeting nucleic acid is at least 94% reverse complementary to a portion of the target RNA. In some embodiments, the targeting nucleic acid is at least 93% reverse complementary to a portion of the target RNA. In some embodiments, the targeting nucleic acid is at least 92% reverse complementary to a portion of the target RNA. In some embodiments, the targeting nucleic acid is at least 91% reverse complementary to a portion of the target RNA. In some embodiments, the targeting nucleic acid is at least 90% reverse complementary to a portion of the target RNA. In some embodiments, the targeting nucleic acid is at least 85% reverse complementary to a portion of the target RNA. In some embodiments, the targeting nucleic acid is at least 80% reverse complementary to a portion of the target RNA. In some embodiments, the targeting nucleic acid is at least 75% reverse complementary to a portion of the target RNA. In some embodiments, the targeting nucleic acid is at least 70% reverse complementary to a portion of the target RNA. In some embodiments, the antisense nucleic acid sequence is fully reverse complementary or partially reverse complementary (e.g. at least 90% reverse complementary) to a portion of the target RNA. An example of a portion of a target RNA (e.g. targeted or bound by the antisense nucleic acid sequence) may be or include an alternatively spliced exon such as exon 20N. The portion of the target RNA (e.g. targeted or bound by the antisense nucleic acid sequence) may be or include a region of a target RNA near or adjacent to an alternatively spliced exon such as exon 20N.

[0097] An antisense nucleic acid sequence may hybridize or bind to an alternatively spliced region (e.g. of a target RNA). In some embodiments, the antisense nucleic acid sequence is fully reverse complementary to a portion of the alternatively spliced region. In some embodiments, the antisense nucleic acid sequence is partially reverse complementary (e.g. at least 80% reverse complementary or at least 90% reverse complementary) to a portion of the alternatively spliced region. In some embodiments, the targeting nucleic acid is at least 99% reverse complementary to a portion of the alternatively spliced region. In some embodiments, the targeting nucleic acid is at least 98% reverse complementary to a portion of the alternatively spliced region. In some embodiments, the targeting nucleic acid is at least 97% reverse complementary to a portion of the alternatively spliced region. In some embodiments, the targeting nucleic acid is at least 96% reverse complementary to a portion of the alternatively spliced region. In some embodiments, the targeting nucleic acid is at least 95% reverse complementary to a portion of the alternatively spliced region. In some embodiments, the targeting nucleic acid is at least 94% reverse complementary to a portion of the alternatively spliced region. In some embodiments, the targeting nucleic acid is at least 93% reverse complementary to a portion of the alternatively spliced region. In some embodiments, the targeting nucleic acid is at least 92% reverse complementary to a portion of the alternatively spliced region. In some embodiments, the targeting nucleic acid is at least 91% reverse complementary to a portion of the alternatively spliced region. In some embodiments, the targeting nucleic acid is at least 90% reverse complementary to a portion of the alternatively spliced region. In some embodiments, the targeting nucleic acid is at least 85% reverse complementary to a portion of the alternatively spliced region. In some embodiments, the targeting nucleic acid is at least 80% reverse complementary to a portion of the alternatively spliced region. In some embodiments, the targeting nucleic acid is at least 75% reverse complementary to a portion of the alternatively spliced region. In some embodiments, the targeting nucleic acid is at least 70% reverse complementary to a portion of the alternatively spliced region. In some embodiments, the antisense nucleic acid sequence is fully reverse complementary or partially reverse complementary (e.g. at least 90% reverse complementary) to a portion of the alternatively spliced region.

[0098] In some embodiments, the portion of the alternatively spliced region comprises nucleotide positions within 50 base pairs (bp) of a 5′ or 3′ end of the alternatively spliced region. In some embodiments, the portion of the alternatively spliced region comprises nucleotide positions within 45 bp of a 5′ or 3′ end of the alternatively spliced region. In some embodiments, the portion of the alternatively spliced region comprises nucleotide positions within 40 bp of a 5′ or 3′ end of the alternatively spliced region. In some embodiments, the portion of the alternatively spliced region comprises nucleotide positions within 35 bp of a 5′ or 3′ end of the alternatively spliced region. In some embodiments, the portion of the alternatively spliced region comprises nucleotide positions within 30 bp of a 5′ or 3′ end of the alternatively spliced region. In some embodiments, the portion of the alternatively spliced region comprises nucleotide positions within 25 bp of a 5′ or 3′ end of the alternatively spliced region. In some embodiments, the portion of the alternatively spliced region comprises nucleotide positions within 20 bp of a 5′ or 3′ end of the alternatively spliced region. In some embodiments, the portion of the alternatively spliced region comprises nucleotide positions within 15 bp of a 5′ or 3′ end of the alternatively spliced region. In some embodiments, the portion of the alternatively spliced region comprises nucleotide positions within 10 bp of a 5′ or 3′ end of the alternatively spliced region. In some embodiments, the portion of the alternatively spliced region excludes nucleotide positions within 45 bp of a 5′ or 3′ end of the alternatively spliced region. In some embodiments, the portion of the alternatively spliced region excludes nucleotide positions within 40 bp of a 5′ or 3′ end of the alternatively spliced region. In some embodiments, the portion of the alternatively spliced region excludes nucleotide positions within 35 bp of a 5′ or 3′ end of the alternatively spliced region. In some embodiments, the portion of the alternatively spliced region excludes nucleotide positions within 30 bp of a 5′ or 3′ end of the alternatively spliced region. In some embodiments, the portion of the alternatively spliced region excludes nucleotide positions within 25 bp of a 5′ or 3′ end of the alternatively spliced region. In some embodiments, the portion of the alternatively spliced region excludes nucleotide positions within 20 bp of a 5′ or 3′ end of the alternatively spliced region. In some embodiments, the portion of the alternatively spliced region excludes nucleotide positions within 15 bp of a 5′ or 3′ end of the alternatively spliced region. In some embodiments, the portion of the alternatively spliced region excludes nucleotide positions within 10 bp of a 5′ or 3′ end of the alternatively spliced region. In some embodiments, the 5′ or 3′ end is a 5′ end. In some embodiments, the 5′ or 3′ end is a 3′ end.

[0099] In some embodiments, the portion of the alternatively spliced region is within a 5′ half of the alternatively spliced region. In some embodiments, the portion of the alternatively spliced region is within a 5′ end of the alternatively spliced region. In some embodiments, the portion of the alternatively spliced region is within a 5′ half or 5′ end of the alternatively spliced region. In some embodiments, the portion of the alternatively spliced region is within 25 nucleotides, within 50 nucleotides, within 75 nucleotides, within 100 nucleotides, within 125 nucleotides, within 150 nucleotides, within 175 nucleotides, within 200 nucleotides, within 225 nucleotides, or within 250 nucleotides of a 5′ end of an alternatively spliced region.

[0100] In some embodiments, the portion of the alternatively spliced region is within a 3′ half of the alternatively spliced region. In some embodiments, the portion of the alternatively spliced region is within a 3′ end of the alternatively spliced region. In some embodiments, the portion of the alternatively spliced region is within a 3′ half or 3′ end of the alternatively spliced region. In some embodiments, the portion of the alternatively spliced region is within 25 nucleotides, within 50 nucleotides, within 75 nucleotides, within 100 nucleotides, within 125 nucleotides, within 150 nucleotides, within 175 nucleotides, within 200 nucleotides, within 225 nucleotides, or within 250 nucleotides of a 3′ end of an alternatively spliced region.

[0101] In some embodiments, the antisense nucleic acid sequence may include a nucleic acid sequence identical to an antisense nucleic acid sequence in Tables 2A-2B. In some embodiments, the antisense nucleic acid sequence may include a nucleic acid sequence at least 99% identical to an antisense nucleic acid sequence in Tables 2A-2B. In some embodiments, the antisense nucleic acid sequence may include a nucleic acid sequence at least 98% identical to an antisense nucleic acid sequence in Tables 2A-2B. In some embodiments, the antisense nucleic acid sequence may include a nucleic acid sequence at least 97% identical to an antisense nucleic acid sequence in Tables 2A-2B. In some embodiments, the antisense nucleic acid sequence may include a nucleic acid sequence at least 96% identical to an antisense nucleic acid sequence in Tables 2A-2B. In some embodiments, the antisense nucleic acid sequence may include a nucleic acid sequence at least 95% identical to an antisense nucleic acid sequence in Tables 2A-2B. In some embodiments, the antisense nucleic acid sequence may include a nucleic acid sequence at least 94% identical to an antisense nucleic acid sequence in Tables 2A-2B. In some embodiments, the antisense nucleic acid sequence may include a nucleic acid sequence at least 93% identical to an antisense nucleic acid sequence in Tables 2A-2B. In some embodiments, the antisense nucleic acid sequence may include a nucleic acid sequence at least 92% identical to an antisense nucleic acid sequence in Tables 2A-2B. In some embodiments, the antisense nucleic acid sequence may include a nucleic acid sequence at least 91% identical to an antisense nucleic acid sequence in Tables 2A-2B. In some embodiments, the antisense nucleic acid sequence may include a nucleic acid sequence at least 90% identical to an antisense nucleic acid sequence in Tables 2A-2B. In some embodiments, the antisense nucleic acid sequence may include a nucleic acid sequence at least 85% identical to an antisense nucleic acid sequence in Tables 2A-2B. In some embodiments, the antisense nucleic acid sequence may include a nucleic acid sequence at least 80% identical to an antisense nucleic acid sequence in Tables 2A-2B. In some embodiments, the antisense nucleic acid sequence may include a nucleic acid sequence at least 75% identical to an antisense nucleic acid sequence in Tables 2A-2B. In some embodiments, the antisense nucleic acid sequence may include a nucleic acid sequence at least 70% identical to an antisense nucleic acid sequence in Tables 2A-2B. In some embodiments, the targeting nucleic acid targets or binds with an RNA that includes reverse complement of any of the aforementioned sequences. In some embodiments, the antisense nucleic acid sequence is encoded by a reverse complement of any of the aforementioned sequences (such as when the antisense nucleic acid sequence is encoded in an expression construct described herein. A reverse complement may include Us in place of Ts, or vice versa.

[0102] In some embodiments, use of the target nucleic acid sequence results in a percentage of productive isoform of SCN1A, for example as determined in Table 2C. An example of a productive isoform may include an isoform excluding exon 21N of a mouse SCN1A transcript, or an isoform excluding exon 20N of a human SCN1A transcript. In some embodiments, use of the targeting nucleic acid results in at least 50% of the productive isoform. In some embodiments, use of an engineered snRNA comprising the targeting nucleic acid results in at least 55% of the productive isoform. In some embodiments, use of an engineered snRNA comprising the targeting nucleic acid results in at least 60% of the productive isoform. In some embodiments, use of an engineered snRNA comprising the targeting nucleic acid results in at least 65% of the productive isoform. In some embodiments, use of an engineered snRNA comprising the targeting nucleic acid results in at least 70% of the productive isoform. In some embodiments, use of an engineered snRNA comprising the targeting nucleic acid results in at least 75% of the productive isoform. In some embodiments, use of an engineered snRNA comprising the targeting nucleic acid results in at least 80% of the productive isoform. In some embodiments, use of an engineered snRNA comprising the targeting nucleic acid results in at least 85% of the productive isoform. In some embodiments, use of an engineered snRNA comprising the targeting nucleic acid results in at least 90% of the productive isoform. In some embodiments, use of an engineered snRNA comprising the targeting nucleic acid results in at least 91% of the productive isoform. In some embodiments, use of an engineered snRNA comprising the targeting nucleic acid results in at least 92% of the productive isoform. In some embodiments, use of an engineered snRNA comprising the targeting nucleic acid results in no more than 50% of the productive isoform. In some embodiments, use of an engineered snRNA comprising the targeting nucleic acid results in no more than 55% of the productive isoform. In some embodiments, use of an engineered snRNA comprising the targeting nucleic acid results in no more than 60% of the productive isoform. In some embodiments, use of an engineered snRNA comprising the targeting nucleic acid results in no more than 65% of the productive isoform. In some embodiments, use of an engineered snRNA comprising the targeting nucleic acid results in no more than 70% of the productive isoform. In some embodiments, use of an engineered snRNA comprising the targeting nucleic acid results in no more than 75% of the productive isoform. In some embodiments, use of an engineered snRNA comprising the targeting nucleic acid results in no more than 80% of the productive isoform. In some embodiments, use of an engineered snRNA comprising the targeting nucleic acid results in no more than 85% of the productive isoform. In some embodiments, use of an engineered snRNA comprising the targeting nucleic acid results in no more than 90% of the productive isoform. In some embodiments, use of an engineered snRNA comprising the targeting nucleic acid results in no more than 91% of the productive isoform. In some embodiments, use of an engineered snRNA comprising the targeting nucleic acid results in no more than 92% of the productive isoform.

[0103] In some embodiments, the antisense nucleic acid sequence may include the nucleic acid sequence of SEQ ID NO: 23, or a reverse complement thereof. In some embodiments, the antisense nucleic acid sequence is 85%, 86%, 87%, 88%, 89%, 90%, 91%, 92%, 93%, 94%, 95%, 96%, 97%, 98%, 99%, or 100% identical to SEQ ID NO: 23 or a reverse complement thereof, or a range of % identities defined by any two of the aforementioned percentages.

[0104] In some embodiments, the antisense nucleic acid sequence may include the nucleic acid sequence of SEQ ID NO: 53, or a reverse complement thereof. In some embodiments, the antisense nucleic acid sequence is 85%, 86%, 87%, 88%, 89%, 90%, 91%, 92%, 93%, 94%, 95%, 96%, 97%, 98%, 99%, or 100% identical to SEQ ID NO: 53 or a reverse complement thereof, or a range of % identities defined by any two of the aforementioned percentages.

[0105] In some embodiments, the antisense nucleic acid sequence may include the nucleic acid sequence of SEQ ID NO: 98, or a reverse complement thereof. In some embodiments, the antisense nucleic acid sequence is 85%, 86%, 87%, 88%, 89%, 90%, 91%, 92%, 93%, 94%, 95%, 96%, 97%, 98%, 99%, or 100% identical to SEQ ID NO: 98 or a reverse complement thereof, or a range of % identities defined by any two of the aforementioned percentages.

[0106] The antisense nucleic acid sequence may bind to or be reverse complementary to a targeted region. In some embodiments, the antisense nucleic acid sequence binds to a target mRNA at a region 5′ or 3′ relative to an alternatively spliced exon. In some embodiments, the antisense nucleic acid sequence binds to an SCN1A mRNA at a region 5′ or 3′ relative to exon 20N. The antisense nucleic acid sequence may bind to an SCN1A mRNA comprising the sequence of SEQ ID NO: 153. The antisense nucleic acid sequence may bind to an SCN1A mRNA comprising the sequence of SEQ ID NO: 154.

[0107] In some embodiments, the antisense nucleic acid sequence binds to a target pre-mRNA at a region 5′ relative to an alternatively spliced exon (e.g. an NMD exon). The region may be up to 25 nucleotides, up to 50 nucleotides, up to 75 nucleotides, up to 100 nucleotides, or more, upstream from or 5′ to the alternatively spliced exon in the target pre-mRNA.

[0108] In some embodiments, the antisense nucleic acid sequence binds to an SCN1A pre-mRNA at a region 5′ relative to exon 20N. The region may be up to 25 nucleotides, up to 50 nucleotides, up to 75 nucleotides, up to 100 nucleotides, or more, upstream from or 5′ to exon 20N in an SCN1A pre-mRNA.

[0109] In some embodiments, the antisense nucleic acid sequence binds to a target pre-mRNA at a region 3′ relative to an alternatively spliced exon (e.g. an NMD exon). The region may be up to 25 nucleotides, up to 50 nucleotides, up to 75 nucleotides, up to 100 nucleotides, or more, downstream from or 3′ to the alternatively spliced exon in the target pre-mRNA.

[0110] In some embodiments, the antisense nucleic acid sequence binds to an SCN1A pre-mRNA at a region 3′ relative to exon 20N. The region may be up to 25 nucleotides, up to 50 nucleotides, up to 75 nucleotides, up to 100 nucleotides, or more, downstream from or 3′ to exon 20N in an SCN1A pre-mRNA.

[0111] In some embodiments, the engineered U7 snRNA includes an antisense nucleic acid sequence 3′ to the ESS nucleic acid sequence. In some embodiments, the engineered U7 snRNA includes an antisense nucleic acid sequence downstream relative to the ESS nucleic acid sequence. In some embodiments, the engineered U7 snRNA includes an antisense nucleic acid sequence 3′ or downstream relative to the ESS nucleic acid sequence.

### Sm Binding Sites

[0112] Described herein, in some embodiments, are systems that include a Sm binding site. The Sm binding site may be included in a modified or recombinant snRNA or U7 snRNA. Sm proteins may bind to a U7 snRNA via the Sm binding site. Once the Sm proteins bind the U7 snRNA in the cytoplasm they may bind to a pre-mRNA and regulate splicing. In some embodiments, the system contains a Sm-like binding site. In some embodiments, the Sm binding site comprises AAUUUGUCUAG (SEQ ID NO: 150). In some embodiments, the Sm binding site comprises AAUUUUUGGAG (SEQ ID NO: 151; smOPT). A modified or recombinant U7 snRNA sequence may include a Sm binding site. A system may encode a modified or recombinant U7 snRNA sequence that includes a Sm binding site.

[0113] In some embodiments, the Sm binding site may be 3′ relative to the ESS nucleic acid sequence. In some embodiments, the Sm binding site may be downstream relative to the ESS nucleic acid sequence. In some embodiments, the Sm binding site may be 3′ relative to the antisense nucleic acid sequence. In some embodiments, the Sm binding site may be downstream relative to the antisense nucleic acid sequence. In some embodiments, the Sm binding site is 3′ or downstream relative to the ESS nucleic acid sequence or antisense nucleic acid sequence.

### U7 3′ Hairpins

[0114] Described herein, in some embodiments, are systems that include a hairpin sequence. The hairpin sequence may be included in a modified or recombinant snRNA or U7 snRNA. The hairpin sequence may include a U7 hairpin sequence. The U7 hairpin sequence may be a 3′ U7 hairpin sequence. A modified or recombinant U7 snRNA sequence may include the hairpin sequence. A system may encode a modified or recombinant U7 snRNA sequence that includes a hairpin sequence.

[0115] Described herein, in some embodiments, is a nucleic acid system that may contain a hairpin sequence comprising a U7 small nuclear RNA (snRNA) hairpin sequence. A hairpin may include an unpaired loop of RNA that is created when a RNA strand folds and forms complementary base pairs with another section of the same strand. The resulting structure may look like a loop or a U-shape. Hairpins may include a common type of secondary structure in RNA molecules and can be formed when two complementary sequences in a single RNA molecule meet and bind each other.

[0116] In some embodiments, the U7 snRNA hairpin sequence comprises the nucleic acid sequence of SEQ ID NO: 4. In some embodiments, the U7 snRNA hairpin sequence comprises a nucleic acid sequence at least 90%, at least 91%, at least 92%, at least 93%, at least 94%, at least 95%, at least 96%, at least 97%, at least 98%, or at least 99% identical to SEQ ID NO: 4.

[0117] In some embodiments, the hairpin sequence may include a 3′ hairpin sequence. In some embodiments, the hairpin sequence may be 3′ or downstream relative to the ESS nucleic acid sequence. In some embodiments, the hairpin sequence may be 3′ or downstream relative to the antisense nucleic acid sequence. In some embodiments, the hairpin sequence may be 3′ or downstream relative to or the Sm binding site. In some embodiments, the hairpin sequence is 3′ or downstream relative to the ESS nucleic acid sequence, the antisense nucleic acid sequence, or the Sm binding site.

### Expression Constructs

[0118] Described herein, in some embodiments, are expression constructs. An expression construct may include an expression cassette. The expression construct may be DNA. The expression construct may encode an RNA system described herein. The expression construct may encode an RNA such as a modified U7 snRNA. The expression construct may encode an ESS sequence, a U7 antisense sequence, a Sm binding site, or a U7 3′ hairpin, or a combination thereof. For example, an expression construct may encode an ESS sequence, a U7 antisense sequence, a Sm binding site, and a U7 3′ hairpin, which may be operably connected to a promoter within the expression construct. The expression construct may be or include a viral vector. The expression construct may be included in a composition herein. The expression construct may be included in a virus or viral delivery agent.

[0119] In some embodiments, the system may include an expression cassette. In some embodiments, the expression cassette may include a promoter. In some embodiments, the expression cassette may encode an exonic splicing sequence. In some embodiments, the expression cassette may encode a U7 targeting sequence. In some embodiments, the expression cassette may encode a smOPT sequence. In some embodiments, the expression cassette may encode a U7 3′ hairpin structure. In some embodiments, the expression cassette may include a 3′ terminator sequence. In some embodiments, the expression cassette may include or encode a combination of two or more of the following: a promoter, an exonic splicing sequence, a U7 targeting sequence, a smOPT, a U7 3′ hairpin structure, and a 3′ terminator sequence.

[0120] Some embodiments include an arrayed series of modified U7 snRNAs. In some embodiments, the array includes multiple U7 modules. Each module may encode a targeting sequence. The targeting sequences of multiple modules may be the same as each other. The targeting sequences of some modules may be different from each other.

[0121] An expression construct may encode multiple engineered or modified snRNAs. For example, an expression construct may encode 1, 2, 3, 4, 5, 6, 7, 8, 9, or 10 copies of a recombinant U7 snRNA. In some embodiments, the expression construct encodes 1 copy of a recombinant U7 snRNA. In some embodiments, the expression construct encodes 2 copies of the recombinant U7 snRNA. In some embodiments, the expression construct encodes 3 copies of the recombinant U7 snRNA. In some embodiments, the expression construct encodes 4 copies of the recombinant U7 snRNA. In some embodiments, the expression construct encodes 5 copies of the recombinant U7 snRNA. In some embodiments, the expression construct encodes 6 copies of the recombinant U7 snRNA. In some embodiments, the expression construct encodes 7 copies of the recombinant U7 snRNA. In some embodiments, the expression construct encodes 8 copies of the recombinant U7 snRNA. In some embodiments, the expression construct encodes 9 copies of the recombinant U7 snRNA. In some embodiments, the expression construct encodes 10 copies of the recombinant U7 snRNA. In some embodiments, all 1, 2, 3, 4, 5, 6, 7, 8, 9, or 10 copies of a recombinant U7 snRNA sequence are operably linked to one or more promoters. For example, multiple copies of the recombinant U7 snRNA sequence may be operably linked to a single promoter. In some embodiments, all 1, 2, 3, 4, 5, 6, 7, 8, 9, or 10 copies of a recombinant U7 snRNA sequence are operably linked to one or more 3′ terminator sequences.

[0122] In some embodiments, the expression system produces a greater amount of RNA from the transcribable region than an expression system having a wild-type promoter and wild-type terminator operably coupled to the transcribable region. In some embodiments, the amount of RNA produced is at least 10% greater. Described herein, in some embodiments, are methods of producing a ribonucleic acid (RNA), comprising contacting a cell with the expression system.

[0123] A modified U7 snRNA may be expressed from a U7 cassette. A functional U7 cassette may include, in the following order from 5′ to 3′: (1) a promoter, (2) an optional exonic splicing silencer, (3) a targeting sequence complementary to a region of a target mRNA, (4) an smOPT sequence, (5) a hairpin sequence, and (6) a 3′ termination signal. The expressed functional U7 snRNA consists of, in the following order from 5′ to 3′: (1) an optional exonic splicing silencer, (2) a targeting sequence complementary to a region of target mRNA, (3) an smOPT sequence, and (4) a hairpin sequence.

[0124] Some examples of expression constructs include a DNA sequence encoding an snRNA of Tables 14A-14C, or a sequence at least 80% identical, at least 85% identical, at least 90% identical, at least 91% identical, at least 92% identical, at least 93% identical, at least 94% identical, at least 95% identical, at least 96% identical, at least 97% identical, at least 98% identical, or at least 99% identical thereto.

[0125] Disclosed herein, in some embodiments, are polynucleotides, comprising a promoter, a coding sequence, and a terminator sequence, wherein the coding sequence comprises a nucleic acid sequence having at least 80%, at least 85%, at least 90%, at least 95%, at least 98%, at least 99%, or 100% identity to the nucleic acid sequence of any one of SEQ ID NOs: 364-566.

### Promoters

[0126] Described herein, in some embodiments, is a nucleic acid system that may contain a promoter sequence. The promoter may be a part of an expression construct. A promoter may include a sequence of DNA to which proteins bind to initiate transcription of a single RNA transcript from the DNA downstream of the promoter. The RNA transcript may encode a protein (mRNA), or can have a function in and of itself, such as tRNA or snRNA. Promoters may be located near the transcription start sites of genes. The promoter may be operably connected with an ESS sequence, a U7 targeting sequence, a Sm binding site, or a U7 3′ hairpin, or a combination thereof. For example, the promoter may be operably connected with an ESS sequence, a U7 targeting sequence, a Sm binding site, and a U7 3′ hairpin within an expression construct.

[0127] In some embodiments, the promoter is directly upstream of a transcriptional start site for the engineered snRNA. In some embodiments, the promoter is 5 bps upstream of the transcriptional start site. In some embodiments, the promoter is 10 bps upstream of the transcriptional start site. In some embodiments, the promoter is 15 bps upstream of the transcriptional start site. In some embodiments, the promoter is 20 bps upstream of the transcriptional start site. In some embodiments, the promoter is 25 bps upstream of the transcriptional start site. In some embodiments, the promoter is 30 bps upstream of the transcriptional start site. In some embodiments, the promoter is 35 bps upstream of the transcriptional start site. In some embodiments, the promoter is 40 bps upstream of the transcriptional start site. In some embodiments, the promoter is 45 bps upstream of the transcriptional start site. In some embodiments, the promoter is 50 bps upstream of the transcriptional start site. In some embodiments, the promoter is 55 bps upstream of the transcriptional start site. In some embodiments, the promoter is 60 bps upstream of the transcriptional start site. In some embodiments, the promoter is 65 bps upstream of the transcriptional start site. In some embodiments, the promoter is 70 bps upstream of the transcriptional start site. In some embodiments, the promoter is 75 bps upstream of the transcriptional start site. In some embodiments, the promoter is 80 bps upstream of the transcriptional start site. In some embodiments, the promoter is 85 bps upstream of the transcriptional start site. In some embodiments, the promoter is 90 bps upstream of the transcriptional start site. In some embodiments, the promoter is 95 bps upstream of the transcriptional start site. In some embodiments, the promoter is 100 bps upstream of the transcriptional start site. In some embodiments, the promoter is 200 bps upstream of the transcriptional start site. In some embodiments, the promoter is 300 bps upstream of the transcriptional start site. In some embodiments, the promoter is 400 bps upstream of the transcriptional start site. In some embodiments, the promoter is 500 bps upstream of the transcriptional start site. In some embodiments, the promoter is 600 bps upstream of the transcriptional start site. In some embodiments, the promoter is 700 bps upstream of the transcriptional start site. In some embodiments, the promoter is 800 bps upstream of the transcriptional start site. In some embodiments, the promoter is 900 bps upstream of the transcriptional start site. In some embodiments, the promoter is 1000 bps upstream of the transcriptional start site. Promoters can be about 100-1000 base pairs long, the sequence of which is highly dependent on the gene and product of transcription, type or class of RNA polymerase recruited to the site, and species of organism. In some embodiments, the promoter is 100 base pairs long. In some embodiments, the promoter is 200 base pairs long. In some embodiments, the promoter is 300 base pairs long. In some embodiments, the promoter is 400 base pairs long. In some embodiments, the promoter is 500 base pairs long. In some embodiments, the promoter is 600 base pairs long. In some embodiments, the promoter is 700 base pairs long. In some embodiments, the promoter is 800 base pairs long. In some embodiments, the promoter is 900 base pairs long. In some embodiments, the promoter is 1000 base pairs long.

[0128] In some embodiments, the promoter sequence may include a mouse or human promoter sequence. In some embodiments, the promoter sequence may include a mouse promoter sequence. In some embodiments, the promoter sequence may include a human promoter sequence.

[0129] The promoter may include an snRNA promoter. In some embodiments, the snRNA promoter includes a mouse U1 snRNA (“MmU1”) promoter, a mouse U2 snRNA (“MmU2”) promoter, a mouse U3 snRNA (“MmU3”) promoter, a mouse U4 snRNA (“MmU4”) promoter, a mouse U5 snRNA (“MmU5”) promoter, a mouse U6 snRNA (“MmU6”) promoter, a mouse U7 snRNA (“MmU7”) promoter, a mouse U11 snRNA (“MmU11”) promoter, a mouse U12 snRNA (“MmU12”) promoter, a mouse U7SK snRNA (“MmU7SK”) promoter, a human U1 snRNA (“HsU1”) promoter, a human U2 snRNA (“HsU2”) promoter, a human U3 snRNA (“HsU3”) promoter, a human U4 snRNA (“HsU4”) promoter, a human U5 snRNA (“HsU5”) promoter, a human U6 snRNA (“HsU6”) promoter, a human U7 snRNA (“HsU7”) promoter, a human U11 snRNA (“HsU11”) promoter, a human U12 snRNA (“HsU12”) promoter, a human U7SK snRNA (“HsU7SK”) promoter, or a functional combination of fragments thereof.

[0130] The snRNA promoter may include a MmU1 promoter. The snRNA promoter may include a MmU2 promoter. The snRNA promoter may include a MmU3 promoter. The snRNA promoter may include a MmU4 promoter. The snRNA promoter may include a MmU5 promoter. The snRNA promoter may include a MmU6 promoter. The snRNA promoter may include a MmU7 promoter. The snRNA promoter may include a MmU11 promoter. The snRNA promoter may include a MmU12 promoter. The snRNA promoter may include a MmU7SK promoter. The snRNA promoter may include a HsU1 promoter. The snRNA promoter may include a HsU2 promoter. The snRNA promoter may include a HsU3 promoter. The snRNA promoter may include a HsU4 promoter. The snRNA promoter may include a HsU5 promoter. The snRNA promoter may include a HsU6 promoter. The snRNA promoter may include a HsU7 promoter. The snRNA promoter may include a HsU11 promoter. The snRNA promoter may include a HsU12 promoter. The snRNA promoter may include a HsU7SK promoter.

[0131] The snRNA promoter may include a promoter fragment or a combination of promoter fragments. The snRNA promoter may include a MmU1 promoter fragment. The snRNA promoter fragment may include a MmU2 promoter fragment. The snRNA promoter fragment may include a MmU3 promoter fragment. The snRNA promoter fragment may include a MmU4 promoter fragment. The snRNA promoter fragment may include a MmU5 promoter fragment. The snRNA promoter fragment may include a MmU6 promoter fragment. The snRNA promoter fragment may include a MmU7 promoter fragment. The snRNA promoter fragment may include a MmU11 promoter fragment. The snRNA promoter fragment may include a MmU12 promoter fragment. The snRNA promoter fragment may include a MmU7SK promoter fragment. The snRNA promoter fragment may include a HsU1 promoter fragment. The snRNA promoter fragment may include a HsU2 promoter fragment. The snRNA promoter fragment may include a HsU3 promoter fragment. The snRNA promoter fragment may include a HsU4 promoter fragment. The snRNA promoter fragment may include a HsU5 promoter fragment. The snRNA promoter fragment may include a HsU6 promoter fragment. The snRNA promoter fragment may include a HsU7 promoter fragment. The snRNA promoter fragment may include a HsU11 promoter fragment. The snRNA promoter fragment may include a HsU12 promoter fragment. The snRNA promoter fragment may include a HsU7SK promoter fragment.

[0132] The snRNA promoter may include a promoter proximal end. The snRNA promoter proximal end may include a MmU1 promoter proximal end fragment. The snRNA promoter proximal end fragment may include a MmU2 promoter proximal end fragment. The snRNA promoter proximal end fragment may include a MmU3 promoter proximal end fragment. The snRNA promoter proximal end fragment may include a MmU4 promoter proximal end fragment. The snRNA promoter proximal end fragment may include a MmU5 promoter proximal end fragment. The snRNA promoter proximal end fragment may include a MmU6 promoter proximal end fragment. The snRNA promoter proximal end fragment may include a MmU7 promoter proximal end fragment. The snRNA promoter proximal end fragment may include a MmU11 promoter proximal end fragment. The snRNA promoter proximal end fragment may include a MmU12 promoter proximal end fragment. The snRNA promoter proximal end fragment may include a MmU7SK promoter proximal end fragment. The snRNA promoter proximal end fragment may include a HsU1 promoter proximal end fragment. The snRNA promoter proximal end fragment may include a HsU2 promoter proximal end fragment. The snRNA promoter proximal end fragment may include a HsU3 promoter proximal end fragment. The snRNA promoter proximal end fragment may include a HsU4 promoter proximal end fragment. The snRNA promoter proximal end fragment may include a HsU5 promoter proximal end fragment. The snRNA promoter proximal end fragment may include a HsU6 promoter proximal end fragment. The snRNA promoter proximal end fragment may include a HsU7 promoter proximal end fragment. The snRNA promoter proximal end fragment may include a HsU11 promoter proximal end fragment. The snRNA promoter proximal end fragment may include a HsU12 promoter proximal end fragment. The snRNA promoter proximal end fragment may include a HsU7SK promoter proximal end fragment.

[0133] The snRNA promoter may include a promoter distal end. The snRNA promoter distal end may include a MmU1 promoter distal end fragment. The snRNA promoter distal end fragment may include a MmU2 promoter distal end fragment. The snRNA promoter distal end fragment may include a MmU3 promoter distal end fragment. The snRNA promoter distal end fragment may include a MmU4 promoter distal end fragment. The snRNA promoter distal end fragment may include a MmU5 promoter distal end fragment. The snRNA promoter distal end fragment may include a MmU6 promoter distal end fragment. The snRNA promoter distal end fragment may include a MmU7 promoter distal end fragment. The snRNA promoter distal end fragment may include a MmU11 promoter distal end fragment. The snRNA promoter distal end fragment may include a MmU12 promoter distal end fragment. The snRNA promoter distal end fragment may include a MmU7SK promoter distal end fragment. The snRNA promoter distal end fragment may include a HsU1 promoter distal end fragment. The snRNA promoter distal end fragment may include a HsU2 promoter distal end fragment. The snRNA promoter distal end fragment may include a HsU3 promoter distal end fragment. The snRNA promoter distal end fragment may include a HsU4 promoter distal end fragment. The snRNA promoter distal end fragment may include a HsU5 promoter distal end fragment. The snRNA promoter distal end fragment may include a HsU6 promoter distal end fragment. The snRNA promoter distal end fragment may include a HsU7 promoter distal end fragment. The snRNA promoter distal end fragment may include a HsU11 promoter distal end fragment. The snRNA promoter distal end fragment may include a HsU12 promoter distal end fragment. The snRNA promoter distal end fragment may include a HsU7SK promoter distal end fragment.

[0134] In some embodiments, the promoter sequence may include an snRNA promoter sequence. In some embodiments, the promoter sequence may include a U7 snRNA promoter sequence. In some embodiments, the promoter sequence may include a U1 promoter sequence. In some embodiments, the promoter sequence may include a mouse U7 snRNA (“Mm U7”) promoter sequence. In some embodiments, the promoter sequence may include a human U7 snRNA (“Hs U7”) promoter sequence. In some embodiments, the promoter sequence may include a mouse U1a1 (“mu1a1” or “Mm U1a1”) promoter sequence. In some embodiments, the promoter sequence may include a human U1-1 (“HU1” or “Hs U1-1”) promoter sequence. In some embodiments, the promoter sequence may include a fragment or combination of fragments of the promotors listed above. In some embodiments, the promoter sequence comprises a mouse U7 snRNA (“Mm U7”) promoter sequence, a human U7 snRNA (“Hs U7”) promoter sequence, a mouse U1a1 (“mu1a1” or “Mm U1a1”) promoter sequence, or a human U1-1 (“HU1” or “Hs U1-1”) promoter sequence, or a fragment or combination of fragments thereof.

[0135] In some embodiments, the promoter sequence may include a U7 snRNA promoter sequence having a distal sequence element (DSE) replaced with a DSE of a U1-1 promoter sequence. In some embodiments, the promoter sequence may include a U7 snRNA promoter sequence having a DSE replaced with a U1a1 promoter sequence. In some embodiments, the promoter sequence comprises a U7 snRNA promoter sequence having a distal sequence element (DSE) replaced with a DSE of a U1-1 or U1a1 promoter sequence. The promoter DSE is a region of the DNA that is normally found upstream of a transcriptional start site. The DSE is usually found upstream, from −250 to −170 bp. In some embodiments, the DSE is at least 10 base pairs long. In some embodiments, the DSE is at least 20 base pairs long. In some embodiments, the DSE is at least 30 base pairs long. In some embodiments, the DSE is at least 40 base pairs long. In some embodiments, the DSE is at least 50 base pairs long. In some embodiments, the DSE is at least 60 base pairs long. In some embodiments, the DSE is at least 70 base pairs long. In some embodiments, the DSE is at least 80 base pairs long. In some embodiments, the DSE is at least 90 base pairs long. In some embodiments, the DSE is at least 100 base pairs long. In some embodiments, the DSE is at least 110 base pairs long. In some embodiments, the DSE is at least 120 base pairs long. In some embodiments, the DSE is at least 130 base pairs long. In some embodiments, the DSE is at least 140 base pairs long. In some embodiments, the DSE is at least 150 base pairs long. In some embodiments, the DSE is at least 160 base pairs long.

[0136] In some embodiments, the promoter sequence may include a mouse U7 promoter sequence having a proximal sequence element (PSE) replaced with a PSE of a U1-1 promoter sequence. In some embodiments, the promoter sequence may include a mouse U7 promoter sequence having a PSE replaced with a U1a1 promoter sequence. In some embodiments, the promoter sequence comprises a mouse U7 promoter sequence having a proximal sequence element (PSE) replaced with a PSE of a U1-1 or U1a1 promoter sequence. The promoter PSE may be an essential promoter element located 40-70 bp upstream of the ORF. The promoter PSE may be recognized by a specific transcription factor, snRNA activating protein complex (SNAPc). In some embodiments, the promoter PSE is 5 base pairs long. In some embodiments, the promoter PSE is 10 base pairs long. In some embodiments, the promoter PSE is 15 base pairs long. In some embodiments, the promoter PSE is 20 base pairs long. In some embodiments, the promoter PSE is 25 base pairs long. In some embodiments, the promoter PSE is 30 base pairs long. In some embodiments, the promoter PSE is 35 base pairs long. In some embodiments, the promoter PSE is 40 base pairs long. In some embodiments, the promoter PSE is 45 base pairs long. In some embodiments, the promoter PSE is 50 base pairs long. In some embodiments, the promoter PSE is 55 base pairs long. In some embodiments, the promoter PSE is 60 base pairs long.

[0137] In some embodiments, the promoter sequence may include a nucleic acid sequence identical to a promoter sequence in Table 5. In some embodiments, the promoter sequence may include a nucleic acid sequence at least 99% identical to a promoter sequence in Table 5. In some embodiments, the promoter sequence may include a nucleic acid sequence at least 98% identical to a promoter sequence in Table 5. In some embodiments, the promoter sequence may include a nucleic acid sequence at least 97% identical to a promoter sequence in Table 5. In some embodiments, the promoter sequence may include a nucleic acid sequence at least 96% identical to a promoter sequence in Table 5. In some embodiments, the promoter sequence may include a nucleic acid sequence at least 95% identical to a promoter sequence in Table 5. In some embodiments, the promoter sequence may include a nucleic acid sequence at least 94% identical to a promoter sequence in Table 5. In some embodiments, the promoter sequence may include a nucleic acid sequence at least 93% identical to a promoter sequence in Table 5. In some embodiments, the promoter sequence may include a nucleic acid sequence at least 92% identical to a promoter sequence in Table 5. In some embodiments, the promoter sequence may include a nucleic acid sequence at least 91% identical to a promoter sequence in Table 5. In some embodiments, the promoter sequence may include a nucleic acid sequence at least 90% identical to a promoter sequence in Table 5. In some embodiments, the promoter sequence may include a nucleic acid sequence at least 85% identical to a promoter sequence in Table 5. In some embodiments, the promoter sequence may include a nucleic acid sequence at least 80% identical to a promoter sequence in Table 5. In some embodiments, the promoter sequence may include a nucleic acid sequence at least 75% identical to a promoter sequence in Table 5. In some embodiments, the promoter sequence may include a nucleic acid sequence at least 70% identical to a promoter sequence in Table 5. For the modified Mm U7 promoter in Table 5 (SEQ ID NO: 8), a U7 distal sequence element has been replaced with that of human U1-1 and a U7 proximal sequence element has been replaced with that of mouse U1a1.

[0138] In some embodiments, the promoter sequence may be 5′ or upstream relative to the ESS nucleic acid sequence. In some embodiments, the promoter sequence may be 5′ or upstream relative to the antisense nucleic acid sequence. In some embodiments, the promoter sequence may be 5′ or upstream relative to the Sm binding site. In some embodiments, the promoter sequence may be 5′ or upstream relative to the hairpin sequence. In some embodiments, the promoter sequence is 5′ or upstream relative to the ESS nucleic acid sequence, the antisense nucleic acid sequence, the Sm binding site, or the hairpin sequence.

### 3′ Terminator Sequences

[0139] Described herein, in some embodiments, is a nucleic acid system that may contain a terminator sequence. The terminator sequence may be a part of an expression construct. Described herein, in some embodiments, the nucleic acid system may include a terminator sequence. The terminator sequence may include a region of a nucleic acid sequence that marks the end of a gene or operon during transcription. The terminator sequence may mediate transcriptional termination by providing signals in the newly synthesized transcript RNA that triggers processes which release the transcript RNA from the transcriptional complex. The terminator sequence may be operably connected with an ESS sequence, a U7 targeting sequence, a Sm binding site, or a U7 3′ hairpin, or a combination thereof. For example, the terminator sequence may be operably connected with an ESS sequence, a U7 targeting sequence, a Sm binding site, and a U7 3′ hairpin within an expression construct.

[0140] The terminator may include an snRNA terminator. In some embodiments, the snRNA terminator includes a mouse U1 snRNA (“MmU1”) terminator, a mouse U2 snRNA (“MmU2”) terminator, a mouse U3 snRNA (“MmU3”) terminator, a mouse U4 snRNA (“MmU4”) terminator, a mouse U5 snRNA (“MmU5”) terminator, a mouse U6 snRNA (“MmU6”) terminator, a mouse U7 snRNA (“MmU7”) terminator, a mouse U11 snRNA (“MmU11”) terminator, a mouse U12 snRNA (“MmU12”) terminator, a mouse U7SK snRNA (“MmU7SK”) terminator, a human U1 snRNA (“HsU1”) terminator, a human U2 snRNA (“HsU2”) terminator, a human U3 snRNA (“HsU3”) terminator, a human U4 snRNA (“HsU4”) terminator, a human U5 snRNA (“HsU5”) terminator, a human U6 snRNA (“HsU6”) terminator, a human U7 snRNA (“HsU7”) terminator, a human U11 snRNA (“HsU11”) terminator, a human U12 snRNA (“HsU12”) terminator, a human U7SK snRNA (“HsU7SK”) terminator, or a functional combination of fragments thereof.

[0141] The snRNA terminator may include a MmU1 terminator. The snRNA terminator may include a MmU2 terminator. The snRNA terminator may include a MmU3 terminator. The snRNA terminator may include a MmU4 terminator. The snRNA terminator may include a MmU5 terminator. The snRNA terminator may include a MmU6 terminator. The snRNA terminator may include a MmU7 terminator. The snRNA terminator may include a MmU11 terminator. The snRNA terminator may include a MmU12 terminator. The snRNA terminator may include a MmU7SK terminator. The snRNA terminator may include a HsU1 terminator. The snRNA terminator may include a HsU2 terminator. The snRNA terminator may include a HsU3 terminator. The snRNA terminator may include a HsU4 terminator. The snRNA terminator may include a HsU5 terminator. The snRNA terminator may include a HsU6 terminator. The snRNA terminator may include a HsU7 terminator. The snRNA terminator may include a HsU11 terminator. The snRNA terminator may include a HsU12 terminator. The snRNA terminator may include a HsU7SK terminator.

[0142] The snRNA terminator may include a terminator fragment or a combination of terminator fragments. The snRNA terminator may include a MmU1 terminator fragment. The snRNA terminator fragment may include a MmU2 terminator fragment. The snRNA terminator fragment may include a MmU3 terminator fragment. The snRNA terminator fragment may include a MmU4 terminator fragment. The snRNA terminator fragment may include a MmU5 terminator fragment. The snRNA terminator fragment may include a MmU6 terminator fragment. The snRNA terminator fragment may include a MmU7 terminator fragment. The snRNA terminator fragment may include a MmU11 terminator fragment. The snRNA terminator fragment may include a MmU12 terminator fragment. The snRNA terminator fragment may include a MmU7SK terminator fragment. The snRNA terminator fragment may include a HsU1 terminator fragment. The snRNA terminator fragment may include a HsU2 terminator fragment. The snRNA terminator fragment may include a HsU3 terminator fragment. The snRNA terminator fragment may include a HsU4 terminator fragment. The snRNA terminator fragment may include a HsU5 terminator fragment. The snRNA terminator fragment may include a HsU6 terminator fragment. The snRNA terminator fragment may include a HsU7 terminator fragment. The snRNA terminator fragment may include a HsU11 terminator fragment. The snRNA terminator fragment may include a HsU12 terminator fragment. The snRNA terminator fragment may include a HsU7SK terminator fragment.

[0143] The snRNA terminator may include a terminator proximal end. The snRNA terminator proximal end may include a MmU1 terminator proximal end fragment. The snRNA terminator proximal end fragment may include a MmU2 terminator proximal end fragment. The snRNA terminator proximal end fragment may include a MmU3 terminator proximal end fragment. The snRNA terminator proximal end fragment may include a MmU4 terminator proximal end fragment. The snRNA terminator proximal end fragment may include a MmU5 terminator proximal end fragment. The snRNA terminator proximal end fragment may include a MmU6 terminator proximal end fragment. The snRNA terminator proximal end fragment may include a MmU7 terminator proximal end fragment. The snRNA terminator proximal end fragment may include a MmU11 terminator proximal end fragment. The snRNA terminator proximal end fragment may include a MmU12 terminator proximal end fragment. The snRNA terminator proximal end fragment may include a MmU7SK terminator proximal end fragment. The snRNA terminator proximal end fragment may include a HsU1 terminator proximal end fragment. The snRNA terminator proximal end fragment may include a HsU2 terminator proximal end fragment. The snRNA terminator proximal end fragment may include a HsU3 terminator proximal end fragment. The snRNA terminator proximal end fragment may include a HsU4 terminator proximal end fragment. The snRNA terminator proximal end fragment may include a HsU5 terminator proximal end fragment. The snRNA terminator proximal end fragment may include a HsU6 terminator proximal end fragment. The snRNA terminator proximal end fragment may include a HsU7 terminator proximal end fragment. The snRNA terminator proximal end fragment may include a HsU11 terminator proximal end fragment. The snRNA terminator proximal end fragment may include a HsU12 terminator proximal end fragment. The snRNA terminator proximal end fragment may include a HsU7SK terminator proximal end fragment.

[0144] The snRNA terminator may include a terminator distal end. The snRNA terminator distal end may include a MmU1 terminator distal end fragment. The snRNA terminator distal end fragment may include a MmU2 terminator distal end fragment. The snRNA terminator distal end fragment may include a MmU3 terminator distal end fragment. The snRNA terminator distal end fragment may include a MmU4 terminator distal end fragment. The snRNA terminator distal end fragment may include a MmU5 terminator distal end fragment. The snRNA terminator distal end fragment may include a MmU6 terminator distal end fragment. The snRNA terminator distal end fragment may include a MmU7 terminator distal end fragment. The snRNA terminator distal end fragment may include a MmU11 terminator distal end fragment. The snRNA terminator distal end fragment may include a MmU12 terminator distal end fragment. The snRNA terminator distal end fragment may include a MmU7SK terminator distal end fragment. The snRNA terminator distal end fragment may include a HsU1 terminator distal end fragment. The snRNA terminator distal end fragment may include a HsU2 terminator distal end fragment. The snRNA terminator distal end fragment may include a HsU3 terminator distal end fragment. The snRNA terminator distal end fragment may include a HsU4 terminator distal end fragment. The snRNA terminator distal end fragment may include a HsU5 terminator distal end fragment. The snRNA terminator distal end fragment may include a HsU6 terminator distal end fragment. The snRNA terminator distal end fragment may include a HsU7 terminator distal end fragment. The snRNA terminator distal end fragment may include a HsU11 terminator distal end fragment. The snRNA terminator distal end fragment may include a HsU12 terminator distal end fragment. The snRNA terminator distal end fragment may include a HsU7SK terminator distal end fragment.

[0145] In some embodiments, the terminator sequence may include a mouse or human terminator sequence. In some embodiments, the terminator sequence may include an snRNA terminator sequence. In some embodiments, the terminator sequence may include a U7 snRNA terminator sequence. In some embodiments, the terminator sequence may include a U1 terminator sequence. In some embodiments, the terminator sequence may include a Mm U7 terminator sequence. In some embodiments, the terminator sequence may include a Hs U7 terminator sequence. In some embodiments, the terminator sequence may include a mu1a1 terminator sequence. In some embodiments, the terminator sequence may include a HU1 terminator sequence. In some embodiments, the terminator sequence may include a fragment or a combination of fragments of the terminators listed above. In some embodiments, the terminator sequence comprises a Mm U7 terminator sequence, a Hs U7 terminator sequence, a mu1a1 terminator sequence, or a HU1 terminator sequence, or a fragment or combination of fragments thereof.

[0146] In some embodiments, the terminator sequence comprises a U7 snRNA terminator sequence having a distal sequence element (DSE) replaced with a DSE of a U1-1 terminator sequence. In some embodiments, the terminator sequence comprises a U7 snRNA terminator sequence having a DSE replaced with a DSE of a U1a1 terminator sequence. In some embodiments, the terminator sequence comprises a U7 snRNA terminator sequence having a distal sequence element (DSE) replaced with a DSE of a U1-1 or U1a1 terminator sequence. The terminator DSE is a region of the DNA that is normally found downstream of the snRNA at the position from +250 to +170 bp. In some embodiments, the terminator DSE is at least 10 base pairs long. In some embodiments, the terminator DSE is at least 20 base pairs long. In some embodiments, the terminator DSE is at least 30 base pairs long. In some embodiments, the terminator DSE is at least 40 base pairs long. In some embodiments, the terminator DSE is at least 50 base pairs long. In some embodiments, the terminator DSE is at least 60 base pairs long. In some embodiments, the terminator DSE is at least 70 base pairs long. In some embodiments, the terminator DSE is at least 80 base pairs long. In some embodiments, the terminator DSE is at least 90 base pairs long. In some embodiments, the terminator DSE is at least 100 base pairs long. In some embodiments, the terminator DSE is at least 110 base pairs long. In some embodiments, the terminator DSE is at least 120 base pairs long. In some embodiments, the terminator DSE is at least 130 base pairs long. In some embodiments, the terminator DSE is at least 140 base pairs long. In some embodiments, the terminator DSE is at least 150 base pairs long. In some embodiments, the terminator DSE is at least 160 base pairs long.

[0147] In some embodiments, the terminator sequence may include a mouse U7 snRNA terminator sequence having a proximal sequence element (PSE) replaced with a PSE of a U1-1 terminator sequence. In some embodiments, the terminator sequence may include a mouse U7 snRNA terminator sequence having a PSE replaced with a PSE of a U1a1 terminator sequence. In some embodiments, the terminator sequence comprises a mouse U7 snRNA terminator sequence having a proximal sequence element (PSE) replaced with a PSE of a U1-1 or U1a1 terminator sequence. The terminator PSE may be an essential terminator element located 40-70 bp downstream of the terminator start site. In some embodiments, the terminator PSE is 5 base pairs long. In some embodiments, the terminator PSE is 10 base pairs long. In some embodiments, the terminator PSE is 15 base pairs long. In some embodiments, the terminator PSE is 20 base pairs long. In some embodiments, the terminator PSE is 25 base pairs long. In some embodiments, the terminator PSE is 30 base pairs long. In some embodiments, the terminator PSE is 35 base pairs long. In some embodiments, the terminator PSE is 40 base pairs long. In some embodiments, the terminator PSE is 45 base pairs long. In some embodiments, the terminator PSE is 50 base pairs long. In some embodiments, the terminator PSE is 55 base pairs long. In some embodiments, the terminator PSE is 60 base pairs long.

[0148] In some embodiments, the terminator sequence may include a nucleic acid sequence. In some embodiments, the terminator sequence may include a nucleic acid sequence identical to a terminator sequence in Table 5. In some embodiments, the terminator sequence may include a nucleic acid sequence at least 99% identical to a terminator sequence in Table 5. In some embodiments, the terminator sequence may include a nucleic acid sequence at least 98% identical to a terminator sequence in Table 5. In some embodiments, the terminator sequence may include a nucleic acid sequence at least 97% identical to a terminator sequence in Table 5. In some embodiments, the terminator sequence may include a nucleic acid sequence at least 96% identical to a terminator sequence in Table 5. In some embodiments, the terminator sequence may include a nucleic acid sequence at least 95% identical to a terminator sequence in Table 5. In some embodiments, the terminator sequence may include a nucleic acid sequence at least 94% identical to a terminator sequence in Table 5. In some embodiments, the terminator sequence may include a nucleic acid sequence at least 93% identical to a terminator sequence in Table 5. In some embodiments, the terminator sequence may include a nucleic acid sequence at least 92% identical to a terminator sequence in Table 5. In some embodiments, the terminator sequence may include a nucleic acid sequence at least 910% identical to a terminator sequence in Table 5. In some embodiments, the terminator sequence may include a nucleic acid sequence at least 90% identical to a terminator sequence in Table 5. In some embodiments, the terminator sequence may include a nucleic acid sequence at least 85% identical to a terminator sequence in Table 5. In some embodiments, the terminator sequence may include a nucleic acid sequence at least 80% identical to a terminator sequence in Table 5. In some embodiments, the terminator sequence may include a nucleic acid sequence at least 75% identical to a terminator sequence in Table 5. In some embodiments, the terminator sequence may include a nucleic acid sequence at least 70% identical to a terminator sequence in Table 5.

[0149] In some embodiments, the terminator sequence may include a 3′ terminator sequence. In some embodiments, the terminator sequence is 3′ or downstream relative to the promoter sequence. In some embodiments, the terminator sequence is 3′ or downstream relative to the ESS nucleic acid sequence. In some embodiments, the terminator sequence is 3′ or downstream relative to the antisense nucleic acid sequence. In some embodiments, the terminator sequence is 3′ or downstream relative to the Sm binding site. In some embodiments, the terminator sequence is 3′ or downstream relative to the hairpin sequence. In some embodiments, the terminator sequence is 3′ or downstream relative to the promoter sequence, the ESS nucleic acid sequence, the antisense nucleic acid sequence, the Sm binding site, or the hairpin sequence.

### Recombinant Regulatory Elements

[0150] Described herein, in some embodiments, is a nucleic acid system that may contain one or more regulatory elements such as a promoter sequence or a terminator sequence. The promoter or terminator sequence may be a part of an expression construct. The expression construct may mix and match regulatory sequences such as promoter sequences or terminator sequences from various organism species, or from various genes of a species. A regulatory sequence may mix and match elements such as a distal or proximal end sequence from various organism species, or from various genes of a species.

[0151] Described herein, in some embodiments, is a nucleic acid expression system. In some embodiments, the nucleic acid expression system may contain a regulatory sequence operably coupled to a transcribable region of a nucleic acid. In some embodiments, the regulatory sequence may comprise a proximal regulatory sequence element (PSE). In some embodiments, the regulatory sequence may comprise a distal regulatory sequence element (DSE). In some embodiments, the regulatory sequence may comprise a PSE and a DSE. In some embodiments, the PSE may be comprised of a PSE sequence of a first small nuclear RNA (snRNA) of a first organism species. In some embodiments, the DSE may include a DSE sequence of a second small nuclear RNA (snRNA) of a second organism species. In some embodiments, the first and second snRNAs may be different. In some embodiments, the first and second snRNAs may be the same. In some embodiments, the first and second organism species may be different. In some embodiments, the first and second organism species may be the same. Described herein, in some embodiments, is a nucleic acid system comprised of a regulatory sequence operably coupled to a transcribable region of a nucleic acid, with the regulatory sequence comprised of a proximal regulatory sequence element (PSE) and a distal regulatory sequence element (DSE), wherein the PSE is comprised of a PSE sequence of a first small nuclear RNA (snRNA) of a first organism species, wherein the DSE is comprised of a DSE sequence of a second small nuclear RNA (snRNA) of a second organism species, and wherein the first and second snRNAs are different or wherein the first and second organism species are different.

[0152] In some embodiments, the first snRNA may be a snRNA U1. In some embodiments, the first snRNA may be a snRNA U2. In some embodiments, the first snRNA may be a snRNA U3. In some embodiments, the first snRNA may be a snRNA U4. In some embodiments, the first snRNA may be a snRNA U5. In some embodiments, the first snRNA may be a snRNA U6. In some embodiments, the first snRNA may be a snRNA U7. In some embodiments, the first snRNA may be a snRNA U11. In some embodiments, the first snRNA may be a snRNA U12. In some embodiments, the first snRNA may be a snRNA 7SK. In some embodiments, the first snRNA is selected from the group consisting of snRNA U1, snRNA U2, snRNA U3, snRNA U4, snRNA U5, snRNA U6 snRNA U7, snRNA U11 and snRNA 7SK. In some embodiments, the first snRNA is selected from the group consisting of snRNA U1, snRNA U2, snRNA U3, snRNA U4, snRNA U5, snRNA U6 snRNA U7, snRNA U11, snRNA U12 and snRNA 7SK.

[0153] In some embodiments, the second snRNA may be a snRNA U1. In some embodiments, the second snRNA may be a snRNA U2. In some embodiments, the second snRNA may be a snRNA U3. In some embodiments, the second snRNA may be a snRNA U4. In some embodiments, the second snRNA may be a snRNA U5. In some embodiments, the second snRNA may be a snRNA U6. In some embodiments, the second snRNA may be a snRNA U7. In some embodiments, the second snRNA may be a snRNA U11. In some embodiments, the second snRNA may be a snRNA U12. In some embodiments, the second snRNA may be a snRNA 7SK. In some embodiments, the second snRNA is selected from the group consisting of snRNA U1, snRNA U2, snRNA U3, snRNA U4, snRNA U5, snRNA U6 snRNA U7, snRNA U11 and snRNA 7SK. In some embodiments, the second snRNA is selected from the group consisting of snRNA U1, snRNA U2, snRNA U3, snRNA U4, snRNA U5, snRNA U6 snRNA U7, snRNA U11, snRNA U12 and snRNA 7SK.

[0154] In some embodiments, the first organism species may be a human. In some embodiments, the first organism species may be a mouse. In some embodiments, the second organism species may be a human. In some embodiments, the second organism species may be a mouse.

[0155] Described herein, in some embodiments, are nucleic acid expression systems, comprising: a regulatory sequence operably coupled to a transcribable region of a nucleic acid, the regulatory sequence comprising a proximal regulatory sequence element (PSE) and a distal regulatory sequence element (DSE); wherein the PSE comprises a mouse U1 snRNA (“MmU1”) PSE, a mouse U2 snRNA (“MmU2”) PSE, a mouse U3 snRNA (“MmU3”) PSE, a mouse U4 snRNA (“MmU4”) PSE, a mouse U5 snRNA (“MmU5”) PSE, a mouse U6 snRNA (“MmU6”) PSE, a mouse U7 snRNA (“MmU7”) PSE, a mouse U11 snRNA (“MmU11”) PSE, a mouse U12 snRNA (“MmU12”) PSE, a mouse U7SK snRNA (“MmU7SK”) PSE, a human U1 snRNA (“HsU1”) PSE, a human U2 snRNA (“HsU2”) PSE, a human U3 snRNA (“HsU3”) PSE, a human U4 snRNA (“HsU4”) PSE, a human U5 snRNA (“HsU5”) PSE, a human U6 snRNA (“HsU6”) PSE, a human U7 snRNA (“HsU7”) PSE, a human U11 snRNA (“HsU11”) PSE, a human U12 snRNA (“HsU12”) PSE, or a human U7SK snRNA (“HsU7SK”) PSE; wherein the DSE comprises a mouse U1 snRNA (“MmU1”) DSE, a mouse U2 snRNA (“MmU2”) DSE, a mouse U3 snRNA (“MmU3”) DSE, a mouse U4 snRNA (“MmU4”) DSE, a mouse U5 snRNA (“MmU5”) DSE, a mouse U6 snRNA (“MmU6”) DSE, a mouse U7 snRNA (“MmU7”) DSE, a mouse U11 snRNA (“MmU11”) DSE, a mouse U12 snRNA (“MmU12”) DSE, a mouse U7SK snRNA (“MmU7SK”) DSE, a human U1 snRNA (“HsU1”) DSE, a human U2 snRNA (“HsU2”) DSE, a human U3 snRNA (“HsU3”) DSE, a human U4 snRNA (“HsU4”) DSE, a human U5 snRNA (“HsU5”) DSE, a human U6 snRNA (“HsU6”) DSE, a human U7 snRNA (“HsU7”) DSE, a human U11 snRNA (“HsU11”) DSE, a human U12 snRNA (“HsU12”) DSE, or a human U7SK snRNA (“HsU7SK”) DSE; and wherein the PSE and the DSE are from a different species as each other, or from a different snRNA as each other.

[0156] An example of a species includes a human. An example of a species includes a mouse. An example of an snRNA is an snRNA U1. An example of an snRNA is an snRNA U2. In some embodiments, the first snRNA may be an snRNA U3. An example of an snRNA is an snRNA U4. An example of an snRNA is an snRNA U5. In some embodiments, the first snRNA may be an snRNA U6. An example of an snRNA is an snRNA U7. In some embodiments, the first snRNA may be an snRNA U11. In some embodiments, the first snRNA may be an snRNA U12. In some embodiments, the first snRNA may be an snRNA 7SK.

[0157] In some embodiments, the PSE comprises a MmU1 PSE. In some embodiments, the PSE comprises a MmU2 PSE. In some embodiments, the PSE comprises a MmU3 PSE. In some embodiments, the PSE comprises a MmU4 PSE. In some embodiments, the PSE comprises a MmU5 PSE. In some embodiments, the PSE comprises a MmU6 PSE. In some embodiments, the PSE comprises a MmU7 PSE. In some embodiments, the PSE comprises a MmU11 PSE. In some embodiments, the PSE comprises a MmU12 PSE. In some embodiments, the PSE comprises a MmU7SK PSE. In some embodiments, the PSE comprises a HsU1 PSE. In some embodiments, the PSE comprises a HsU2 PSE. In some embodiments, the PSE comprises a HsU3 PSE. In some embodiments, the PSE comprises a HsU4 PSE. In some embodiments, the PSE comprises a HsU5 PSE. In some embodiments, the PSE comprises a HsU6 PSE. In some embodiments, the PSE comprises a HsU7 PSE. In some embodiments, the PSE comprises a HsU11 PSE. In some embodiments, the PSE comprises a HsU12 PSE. In some embodiments, the PSE comprises a HsU7SK PSE. In some embodiments, the PSE comprises a PSE of a regulatory element in Table 5, or a variant thereof.

[0158] In some embodiments, the DSE comprises a MmU1 DSE. In some embodiments, the DSE comprises a MmU2 DSE. In some embodiments, the DSE comprises a MmU3 DSE. In some embodiments, the DSE comprises a MmU4 DSE. In some embodiments, the DSE comprises a MmU5 DSE. In some embodiments, the DSE comprises a MmU6 DSE. In some embodiments, the DSE comprises a MmU7 DSE. In some embodiments, the DSE comprises a MmU11 DSE. In some embodiments, the DSE comprises a MmU12 DSE. In some embodiments, the DSE comprises a MmU7SK DSE. In some embodiments, the DSE comprises a HsU1 DSE. In some embodiments, the DSE comprises a HsU2 DSE. In some embodiments, the DSE comprises a HsU3 DSE. In some embodiments, the DSE comprises a HsU4 DSE. In some embodiments, the DSE comprises a HsU5 DSE. In some embodiments, the DSE comprises a HsU6 DSE. In some embodiments, the DSE comprises a HsU7 DSE. In some embodiments, the DSE comprises a HsU11 DSE. In some embodiments, the DSE comprises a HsU12 DSE. In some embodiments, the DSE comprises a HsU7SK DSE. In some embodiments, the DSE comprises a PSE of a regulatory element in Table 5, or a variant thereof.

[0159] Described herein, in some embodiments, is a nucleic acid expression system. In some embodiments, the nucleic acid expression system may contain a regulatory sequence operably coupled to a transcribable region of a nucleic acid. In some embodiments, the regulatory sequence may include a proximal regulatory sequence element (PSE). In some embodiments, the regulatory sequence may include a distal regulatory sequence element (DSE). In some embodiments, the regulatory sequence may include a PSE and a DSE. In some embodiments, the PSE may include a mouse U7 snRNA (“Mm U7”) PSE. In some embodiments, the PSE may include a human U7 snRNA (“Hs U7”) PSE. In some embodiments, the PSE may include a mouse U1a1 (“mu1a1”) PSE. In some embodiments, the PSE may include a human U1-1 (“HU1” or “Hs U1-1”) PSE.

[0160] In some embodiments, the DSE may include a Mm U7 DSE. In some embodiments, the DSE may include a Hs U7 DSE. In some embodiments, the DSE may include a mu1a1 DSE. In some embodiments, the DSE may include a HU1 DSE. In some embodiments, when the PSE comprises the Mm U7 PSE, the DSE does not comprise the Mm U7 DSE. In some embodiments, when the PSE comprises the Hs U7 PSE, the DSE does not comprise the Hs U7 DSE. In some embodiments, when the PSE comprises the mu1a1 PSE, the DSE does not comprise the mu1a1 DSE. In some embodiments, when the PSE comprises the HU1 PSE, the DSE does not comprise the HU1 DSE.

[0161] Described herein, in some embodiments, is a nucleic acid system comprised of a regulatory sequence operably coupled to a transcribable region of a nucleic acid, with the regulatory sequence comprised of a proximal regulatory sequence element (PSE) and a distal regulatory sequence element (DSE), wherein the PSE is comprised of a mouse U7 snRNA (“Mm U7”) PSE, a human U7 snRNA (“Hs U7”) PSE, a mouse U1a1 (“mu1a1”) PSE, or a human U1-1 (“HU1” or “Hs U1-1”) PSE; and wherein the DSE is comprised of a Mm U7 DSE, a Hs U7 DSE, a mu1a1 DSE, or a HU1 DSE, wherein when the PSE comprises the Mm U7 PSE, the DSE does not comprise the Mm U7 DSE, when the PSE comprises the Hs U7 PSE, the DSE does not comprise the Hs U7 DSE, when the PSE comprises the mu1a1 PSE, the DSE does not comprise the mu1a1 DSE, and when the PSE comprises the HU1 PSE, the DSE does not comprise the HU1 DSE.

[0162] In some embodiments, the regulatory sequence may include a promoter sequence. In some embodiments, the regulatory sequence may not include a promoter sequence. In some embodiments, the regulatory sequence may include a terminator sequence. In some embodiments, the regulatory sequence may not include a terminator sequence.

[0163] Described herein, in some embodiments, are nucleic acid expression systems, comprising: a promoter sequence comprising a promoter proximal sequence element (PSE) and a promoter distal sequence element (DSE); wherein the PSE comprises a mouse U1 snRNA (“MmU1”) promoter PSE, a mouse U2 snRNA (“MmU2”) promoter PSE, a mouse U3 snRNA (“MmU3”) promoter PSE, a mouse U4 snRNA (“MmU4”) promoter PSE, a mouse U5 snRNA (“MmU5”) promoter PSE, a mouse U6 snRNA (“MmU6”) promoter PSE, a mouse U7 snRNA (“MmU7”) promoter PSE, a mouse U11 snRNA (“MmU11”) promoter PSE, a mouse U12 snRNA (“MmU12”) promoter PSE, a mouse U7SK snRNA (“MmU7SK”) promoter PSE, a human U1 snRNA (“HsU1”) promoter PSE, a human U2 snRNA (“HsU2”) promoter PSE, a human U3 snRNA (“HsU3”) promoter PSE, a human U4 snRNA (“HsU4”) promoter PSE, a human U5 snRNA (“HsU5”) promoter PSE, a human U6 snRNA (“HsU6”) promoter PSE, a human U7 snRNA (“HsU7”) promoter PSE, a human U11 snRNA (“HsU11”) promoter PSE, a human U12 snRNA (“HsU12”) promoter PSE, or a human U7SK snRNA (“HsU7SK”) promoter PSE; wherein the DSE comprises a mouse U1 snRNA (“MmU1”) promoter DSE, a mouse U2 snRNA (“MmU2”) promoter DSE, a mouse U3 snRNA (“MmU3”) promoter DSE, a mouse U4 snRNA (“MmU4”) promoter DSE, a mouse U5 snRNA (“MmU5”) promoter DSE, a mouse U6 snRNA (“MmU6”) promoter DSE, a mouse U7 snRNA (“MmU7”) promoter DSE, a mouse U11 snRNA (“MmU11”) promoter DSE, a mouse U12 snRNA (“MmU12”) promoter DSE, a mouse U7SK snRNA (“MmU7SK”) promoter DSE, a human U1 snRNA (“HsU1”) promoter DSE, a human U2 snRNA (“HsU2”) promoter DSE, a human U3 snRNA (“HsU3”) promoter DSE, a human U4 snRNA (“HsU4”) promoter DSE, a human U5 snRNA (“HsU5”) promoter DSE, a human U6 snRNA (“HsU6”) promoter DSE, a human U7 snRNA (“HsU7”) promoter DSE, a human U11 snRNA (“HsU11”) promoter DSE, a human U12 snRNA (“HsU12”) promoter DSE, or a human U7SK snRNA (“HsU7SK”) promoter DSE; and wherein the promoter PSE and the promoter DSE are from a different species as each other, or from a different snRNA as each other. In some embodiments, the promoter PSE and the promoter DSE are from a different species as each other, and from a different snRNA as each other. Some embodiments include a transcribable region operably coupled to the promoter sequence. Some embodiments include a terminator sequence 3′ to the transcribable region.

[0164] In some embodiments, the promoter PSE comprises a MmU1 promoter PSE. In some embodiments, the promoter PSE comprises a MmU2 promoter PSE. In some embodiments, the promoter PSE comprises a MmU3 promoter PSE. In some embodiments, the promoter PSE comprises a MmU4 promoter PSE. In some embodiments, the promoter PSE comprises a MmU5 promoter PSE. In some embodiments, the promoter PSE comprises a MmU6 promoter PSE. In some embodiments, the promoter PSE comprises a MmU7 promoter PSE. In some embodiments, the promoter PSE comprises a MmU11 promoter PSE. In some embodiments, the promoter PSE comprises a MmU12 promoter PSE. In some embodiments, the promoter PSE comprises a MmU7SK promoter PSE. In some embodiments, the promoter PSE comprises a HsU1 promoter PSE. In some embodiments, the promoter PSE comprises a HsU2 promoter PSE. In some embodiments, the promoter PSE comprises a HsU3 promoter PSE. In some embodiments, the promoter PSE comprises a HsU4 promoter PSE. In some embodiments, the promoter PSE comprises a HsU5 promoter PSE. In some embodiments, the promoter PSE comprises a HsU6 promoter PSE. In some embodiments, the promoter PSE comprises a HsU7 promoter PSE. In some embodiments, the promoter PSE comprises a HsU11 promoter PSE. In some embodiments, the promoter PSE comprises a HsU12 promoter PSE. In some embodiments, the promoter PSE comprises a HsU7SK promoter PSE. In some embodiments, the promoter PSE comprises a promoter PSE of a regulatory element in Table 5, or a variant thereof.

[0165] In some embodiments, the promoter DSE comprises a MmU1 promoter DSE. In some embodiments, the promoter DSE comprises a MmU2 promoter DSE. In some embodiments, the promoter DSE comprises a MmU3 promoter DSE. In some embodiments, the promoter DSE comprises a MmU4 promoter DSE. In some embodiments, the promoter DSE comprises a MmU5 promoter DSE. In some embodiments, the promoter DSE comprises a MmU6 promoter DSE. In some embodiments, the promoter DSE comprises a MmU7 promoter DSE. In some embodiments, the promoter DSE comprises a MmU11 promoter DSE. In some embodiments, the promoter DSE comprises a MmU12 promoter DSE. In some embodiments, the promoter DSE comprises a MmU7SK promoter DSE. In some embodiments, the promoter DSE comprises a HsU1 promoter DSE. In some embodiments, the promoter DSE comprises a HsU2 promoter DSE. In some embodiments, the promoter DSE comprises a HsU3 promoter DSE. In some embodiments, the promoter DSE comprises a HsU4 promoter DSE. In some embodiments, the promoter DSE comprises a HsU5 promoter DSE. In some embodiments, the promoter DSE comprises a HsU6 promoter DSE. In some embodiments, the promoter DSE comprises a HsU7 promoter DSE. In some embodiments, the promoter DSE comprises a HsU11 promoter DSE. In some embodiments, the promoter DSE comprises a HsU12 promoter DSE. In some embodiments, the promoter DSE comprises a HsU7SK promoter DSE. In some embodiments, the promoter DSE comprises a promoter DSE of a regulatory element in Table 5, or a variant thereof.

[0166] Described herein, in some embodiments, is a nucleic acid expression system. In some embodiments, the nucleic acid expression system may include a promoter sequence. In some embodiments, the promoter sequence may include a promoter proximal sequence element (PSE). In some embodiments, the promoter sequence may include a promoter distal sequence element (DSE). In some embodiments, the promoter sequence may include a PSE and DSE. In some embodiments, the promoter PSE may include a mouse U7 snRNA (“Mm U7”) promoter PSE. In some embodiments, the promoter PSE may include a human U7 snRNA (“Hs U7”) promoter PSE. In some embodiments, the promoter PSE may include a mouse U1a1 (“mu1a1”) promoter PSE. In some embodiments, the promoter PSE may include a human U1-1 (“HU1” or “Hs U1-1”) promoter PSE. In some embodiments, the promoter DSE may include a Mm U7 promoter DSE. In some embodiments, the promoter DSE may include a Hs U7 promoter DSE. In some embodiments, the promoter DSE may include a mu1a1 promoter DSE. In some embodiments, the promoter DSE may include a HU1 promoter DSE. In some embodiments, when the promoter PSE comprises the Mm U7 promoter PSE, the promoter DSE does not comprise the Mm U7 promoter DSE. In some embodiments, when the promoter PSE comprises the Hs U7 promoter PSE, the promoter DSE does not comprise the Hs U7 promoter DSE. In some embodiments, when the promoter PSE comprises the mu1a1 promoter PSE, the promoter DSE does not comprise the mu1a1 promoter DSE. In some embodiments, when the promoter PSE comprises the HU1 promoter PSE, the promoter DSE does not comprise the HU1 promoter DSE.

[0167] Described herein, in some embodiments, is a nucleic acid system comprised of a promoter sequence comprised of a promoter proximal sequence element (PSE) and a promoter distal sequence element (DSE), wherein the promoter PSE is comprised of a mouse U7 snRNA (“Mm U7”) promoter PSE, a human U7 snRNA (“Hs U7”) promoter PSE, a mouse U1a1 (“mu1a1”) promoter PSE, or a human U1-1 (“HU1” or “Hs U1-1”) promoter PSE; and wherein the promoter DSE is comprised of a Mm U7 promoter DSE, a Hs U7 promoter DSE, a mu1a1 promoter DSE, or a HU1 promoter DSE, wherein, when the promoter PSE comprises the Mm U7 promoter PSE, the promoter DSE does not comprise the Mm U7 promoter DSE, when the promoter PSE comprises the Hs U7 promoter PSE, the promoter DSE does not comprise the Hs U7 promoter DSE, when the promoter PSE comprises the mu1a1 promoter PSE, the promoter DSE does not comprise the mu1a1 promoter DSE, and when the promoter PSE comprises the HU1 promoter PSE, the promoter DSE does not comprise the HU1 promoter DSE.

[0168] In some embodiments, the system may further comprise a transcribable region operably coupled to the promoter sequence. In some embodiments, the system may further comprise a terminator sequence 3′ to the transcribable region. In some embodiments, the system may further comprise a transcribable region operably coupled to the promoter sequence and a terminator sequence 3′ to the transcribable region.

[0169] Described herein, in some embodiments, are nucleic acid expression systems, comprising, comprising: a terminator sequence 3′ to a transcribable region, the terminator sequence comprising a terminator proximal sequence element (PSE) and a terminator distal sequence element (DSE); wherein the PSE comprises a mouse U1 snRNA (“MmU1”) terminator PSE, a mouse U2 snRNA (“MmU2”) terminator PSE, a mouse U3 snRNA (“MmU3”) terminator PSE, a mouse U4 snRNA (“MmU4”) terminator PSE, a mouse U5 snRNA (“MmU5”) terminator PSE, a mouse U6 snRNA (“MmU6”) terminator PSE, a mouse U7 snRNA (“MmU7”) terminator PSE, a mouse U11 snRNA (“MmU11”) terminator PSE, a mouse U12 snRNA (“MmU12”) terminator PSE, a mouse U7SK snRNA (“MmU7SK”) terminator PSE, a human U1 snRNA (“HsU1”) terminator PSE, a human U2 snRNA (“HsU2”) terminator PSE, a human U3 snRNA (“HsU3”) terminator PSE, a human U4 snRNA (“HsU4”) terminator PSE, a human U5 snRNA (“HsU5”) terminator PSE, a human U6 snRNA (“HsU6”) terminator PSE, a human U7 snRNA (“HsU7”) terminator PSE, a human U11 snRNA (“HsU11”) terminator PSE, a human U12 snRNA (“HsU12”) terminator PSE, or a human U7SK snRNA (“HsU7SK”) terminator PSE; wherein the DSE comprises a mouse U1 snRNA (“MmU1”) terminator DSE, a mouse U2 snRNA (“MmU2”) terminator DSE, a mouse U3 snRNA (“MmU3”) terminator DSE, a mouse U4 snRNA (“MmU4”) terminator DSE, a mouse U5 snRNA (“MmU5”) terminator DSE, a mouse U6 snRNA (“MmU6”) terminator DSE, a mouse U7 snRNA (“MmU7”) terminator DSE, a mouse U11 snRNA (“MmU11”) terminator DSE, a mouse U12 snRNA (“MmU12”) terminator DSE, a mouse U7SK snRNA (“MmU7SK”) terminator DSE, a human U1 snRNA (“HsU1”) terminator DSE, a human U2 snRNA (“HsU2”) terminator DSE, a human U3 snRNA (“HsU3”) terminator DSE, a human U4 snRNA (“HsU4”) terminator DSE, a human U5 snRNA (“HsU5”) terminator DSE, a human U6 snRNA (“HsU6”) terminator DSE, a human U7 snRNA (“HsU7”) terminator DSE, a human U11 snRNA (“HsU11”) terminator DSE, a human U12 snRNA (“HsU12”) terminator DSE, or a human U7SK snRNA (“HsU7SK”) terminator DSE; and wherein the terminator PSE and the terminator DSE are from a different species as each other, or from a different snRNA as each other. In some embodiments, the terminator PSE and the terminator DSE are from a different species as each other, and from a different snRNA as each other. Some embodiments include a promoter sequence, wherein the transcribable region is operably coupled to the promoter sequence.

[0170] In some embodiments, the terminator PSE comprises a MmU1 terminator PSE. In some embodiments, the terminator PSE comprises a MmU2 terminator PSE. In some embodiments, the terminator PSE comprises a MmU3 terminator PSE. In some embodiments, the terminator PSE comprises a MmU4 terminator PSE. In some embodiments, the terminator PSE comprises a MmU5 terminator PSE. In some embodiments, the terminator PSE comprises a MmU6 terminator PSE. In some embodiments, the terminator PSE comprises a MmU7 terminator PSE. In some embodiments, the terminator PSE comprises a MmU11 terminator PSE. In some embodiments, the terminator PSE comprises a MmU12 terminator PSE. In some embodiments, the terminator PSE comprises a MmU7SK terminator PSE. In some embodiments, the terminator PSE comprises a HsU1 terminator PSE. In some embodiments, the terminator PSE comprises a HsU2 terminator PSE. In some embodiments, the terminator PSE comprises a HsU3 terminator PSE. In some embodiments, the terminator PSE comprises a HsU4 terminator PSE. In some embodiments, the terminator PSE comprises a HsU5 terminator PSE. In some embodiments, the terminator PSE comprises a HsU6 terminator PSE. In some embodiments, the terminator PSE comprises a HsU7 terminator PSE. In some embodiments, the terminator PSE comprises a HsU11 terminator PSE. In some embodiments, the terminator PSE comprises a HsU12 terminator PSE. In some embodiments, the terminator PSE comprises a HsU7SK terminator PSE. In some embodiments, the terminator PSE comprises a terminator PSE of a regulatory element in Table 5, or a variant thereof.

[0171] In some embodiments, the terminator DSE comprises a MmU1 terminator DSE. In some embodiments, the terminator DSE comprises a MmU2 terminator DSE. In some embodiments, the terminator DSE comprises a MmU3 terminator DSE. In some embodiments, the terminator DSE comprises a MmU4 terminator DSE. In some embodiments, the terminator DSE comprises a MmU5 terminator DSE. In some embodiments, the terminator DSE comprises a MmU6 terminator DSE. In some embodiments, the terminator DSE comprises a MmU7 terminator DSE. In some embodiments, the terminator DSE comprises a MmU11 terminator DSE. In some embodiments, the terminator DSE comprises a MmU12 terminator DSE. In some embodiments, the terminator DSE comprises a MmU7SK terminator DSE. In some embodiments, the terminator DSE comprises a HsU1 terminator DSE. In some embodiments, the terminator DSE comprises a HsU2 terminator DSE. In some embodiments, the terminator DSE comprises a HsU3 terminator DSE. In some embodiments, the terminator DSE comprises a HsU4 terminator DSE. In some embodiments, the terminator DSE comprises a HsU5 terminator DSE. In some embodiments, the terminator DSE comprises a HsU6 terminator DSE. In some embodiments, the terminator DSE comprises a HsU7 terminator DSE. In some embodiments, the terminator DSE comprises a HsU11 terminator DSE. In some embodiments, the terminator DSE comprises a HsU12 terminator DSE. In some embodiments, the terminator DSE comprises a HsU7SK terminator DSE. In some embodiments, the terminator DSE comprises a terminator DSE of a regulatory element in Table 5, or a variant thereof.

[0172] Described herein, in some embodiments, is a nucleic acid expression system. In some embodiments, the nucleic acid expression system may include a terminator sequence 3′ to a transcribable region. In some embodiments, the terminator sequence may include a terminator proximal sequence element (PSE). In some embodiments, the terminator sequence may include a terminator distal sequence element (DSE). In some embodiments, the terminator sequence may include a terminator PSE and a terminator DSE. In some embodiments, the terminator PSE may include a mouse U7 snRNA (“Mm U7”) terminator PSE. In some embodiments, the terminator PSE may include a human U7 snRNA (“Hs U7”) terminator PSE. In some embodiments, the terminator PSE may include a mouse U1a1 (“mu1a1”) terminator PSE. In some embodiments, the terminator PSE may include a human U1-1 (“HU1” or “Hs U1-1”) terminator PSE. In some embodiments, the terminator DSE may include a Mm U7 terminator DSE. In some embodiments, the terminator DSE may include a Hs U7 terminator DSE. In some embodiments, the terminator DSE may include a mu1a1 terminator DSE. In some embodiments, the terminator DSE may include a HU1 terminator DSE. In some embodiments, when the terminator PSE comprises the Mm U7 terminator PSE, the terminator DSE does not comprise the Mm U7 terminator DSE. In some embodiments, when the terminator PSE comprises the Hs U7 terminator PSE, the terminator DSE does not comprise the Hs U7 terminator DSE. In some embodiments, when the terminator PSE comprises the mu1a1 terminator PSE, the terminator DSE does not comprise the mu1a1 terminator DSE. In some embodiments, when the terminator PSE comprises the HU1 terminator PSE, the terminator DSE does not comprise the HU1 terminator DSE. In some embodiments, the nucleic acid expression system may include a promoter sequence. In some embodiments, the promoter sequence may include the transcribable region operably coupled to the promoter sequence.

[0173] Described herein, in some embodiments, is a nucleic acid system comprised of a terminator sequence 3′ to a transcribable region, the terminator sequence comprised of a terminator proximal sequence element (PSE) and a terminator distal sequence element (DSE), wherein, the terminator PSE is comprised of a mouse U7 snRNA (“Mm U7”) terminator PSE, a human U7 snRNA (“Hs U7”) terminator PSE, a mouse U1a1 (“mu1a1”) terminator PSE, or a human U1-1 (“HU1” or “Hs U1-1”) terminator PSE; and wherein, the terminator DSE is comprised of a Mm U7 terminator DSE, a Hs U7 terminator DSE, a mu1a1 terminator DSE, or a HU1 terminator DSE, wherein, when the terminator PSE comprises the Mm U7 terminator PSE, the terminator DSE does not comprise the Mm U7 terminator DSE, when the terminator PSE comprises the Hs U7 terminator PSE, the terminator DSE does not comprise the Hs U7 terminator DSE, when the terminator PSE comprises the mu1a1 terminator PSE, the terminator DSE does not comprise the mu1a1 terminator DSE, and when the terminator PSE comprises the HU1 terminator PSE, the terminator DSE does not comprise the HU1 terminator DSE.

[0174] Described herein, in some embodiments, is a nucleic acid expression system. In some embodiments, the nucleic acid expression system may include a promoter sequence operably coupled to a transcribable region of a nucleic acid. In some embodiments, the nucleic acid expression system may include a terminator sequence coupled to the transcribable region. In some embodiments, the nucleic acid expression system may include a promoter sequence operably coupled to a transcribable region of a nucleic acid and a terminator sequence coupled to the transcribable region. In some embodiments, the promoter may include a first small nuclear RNA (snRNA) of a first organism species. In some embodiments, the terminator sequence may include a terminator sequence of a second small nuclear RNA (snRNA) of a second organism species. In some embodiments, the first and second snRNAs are different. In some embodiments, the first and second snRNAs are the same. In some embodiments, the first and second organism species are different. In some embodiments, the first and second organism species are the same.

[0175] Described herein, in some embodiments, is a nucleic acid system comprised of a promoter sequence operably coupled to a transcribable region of a nucleic acid, and a terminator sequence coupled to the transcribable region; wherein the promoter sequence is comprised of a promoter sequence of a first small nuclear RNA (snRNA) of a first organism species, wherein the terminator sequence is comprised of a terminator sequence of a second small nuclear RNA (snRNA) of a second organism species, and wherein the first and second snRNAs are different or wherein the first and second organism species are different.

[0176] In some embodiments, the first snRNA may be a snRNA U1. In some embodiments, the first snRNA may be a snRNA U2. In some embodiments, the first snRNA may be a snRNA U3. In some embodiments, the first snRNA may be a snRNA U4. In some embodiments, the first snRNA may be a snRNA U5. In some embodiments, the first snRNA may be a snRNA U6. In some embodiments, the first snRNA may be a snRNA U7. In some embodiments, the first snRNA may be a snRNA U11. In some embodiments, the first snRNA may be a snRNA U12. In some embodiments, the first snRNA may be a snRNA 7SK. In some embodiments, the first snRNA is selected from the group consisting of snRNA U1, snRNA U2, snRNA U3, snRNA U4, snRNA U5, snRNA U6 snRNA U7, snRNA U11 and snRNA 7SK. In some embodiments, the first snRNA is selected from the group consisting of snRNA U1, snRNA U2, snRNA U3, snRNA U4, snRNA U5, snRNA U6 snRNA U7, snRNA U11, snRNA U12 and snRNA 7SK.

[0177] In some embodiments, the second snRNA may be a snRNA U1. In some embodiments, the second snRNA may be a snRNA U2. In some embodiments, the second snRNA may be a snRNA U3. In some embodiments, the second snRNA may be a snRNA U4. In some embodiments, the second snRNA may be a snRNA U5. In some embodiments, the second snRNA may be a snRNA U6. In some embodiments, the second snRNA may be a snRNA U7. In some embodiments, the second snRNA may be a snRNA U11. In some embodiments, the second snRNA may be a snRNA U12. In some embodiments, the second snRNA may be a snRNA 7SK. In some embodiments, the second snRNA is selected from the group consisting of snRNA U1, snRNA U2, snRNA U3, snRNA U4, snRNA U5, snRNA U6 snRNA U7, snRNA U11 and snRNA 7SK. In some embodiments, the second snRNA is selected from the group consisting of snRNA U1, snRNA U2, snRNA U3, snRNA U4, snRNA U5, snRNA U6 snRNA U7, snRNA U11, snRNA U12 and snRNA 7SK.

[0178] In some embodiments, the first organism species may be a human. In some embodiments, the first organism species may be a mouse. In some embodiments, the second organism species may be a human. In some embodiments, the second organism species may be a mouse.

[0179] Described herein, in some embodiments, are nucleic acid expression systems, comprising, comprising: a promoter sequence operably coupled to a transcribable region of a nucleic acid, and a terminator sequence coupled to the transcribable region; wherein the promoter sequence comprises a promoter sequence of a first small nuclear RNA (snRNA) of a first organism species, wherein the terminator sequence comprises a terminator sequence of a second small nuclear RNA (snRNA) of a second organism species, and wherein the first and second snRNAs are different or wherein the first and second organism species are different. In some embodiments, the first snRNA is selected from the group consisting of snRNA U1, snRNA U2, snRNA U3, snRNA U4, snRNA U5, snRNA U6, snRNA U7, snRNA U11, snRNA U12 and snRNA 7SK. In some embodiments, the second snRNA is selected from the group consisting of snRNA U7, snRNA U2, snRNA U3, snRNA U4, snRNA U5, snRNA U6, snRNA U1, snRNA U11, snRNA U12 and snRNA 7SK. In some embodiments, the first snRNA is selected from the group consisting of snRNA U1, snRNA U2, snRNA U3, snRNA U4, snRNA U5, snRNA U6, snRNA U7, snRNA U11, snRNA U12 and snRNA 7SK; the second snRNA is selected from the group consisting of snRNA U7, snRNA U2, snRNA U3, snRNA U4, snRNA U5, snRNA U6, snRNA U1, snRNA U11, snRNA U12 and snRNA 7SK; the first organism species is selected from the group consisting of human and mouse; and the second organism species is selected from the group consisting of mouse and human. In some embodiments, the promoter comprises a promoter PSE sequence and a promoter DSE sequence, and wherein the either the promoter PSE or the promoter DSE is of a different organism species than the first organism species. In some embodiments, the promoter comprises a promoter PSE sequence and a promoter DSE sequence, and wherein the either the promoter PSE or the promoter DSE is of a different snRNA than the first snRNA. In some embodiments, the promoter comprises a promoter PSE sequence and a promoter DSE sequence, and wherein the either the promoter PSE or the promoter DSE is of a different organism species than the first organism species; and wherein the promoter comprises a promoter PSE sequence and a promoter DSE sequence, and wherein the either the promoter PSE or the promoter DSE is of a different snRNA than the first snRNA. In some embodiments, the terminator comprises a terminator PSE sequence and a terminator DSE sequence, and wherein the either the terminator PSE or the terminator DSE is of a different organism species than the second organism species. In some embodiments, the terminator comprises a terminator PSE sequence and a terminator DSE sequence, and wherein the either the terminator PSE or the terminator DSE is of a different snRNA than the second snRNA. In some embodiments, the terminator comprises a terminator PSE sequence and a terminator DSE sequence, and wherein the either the terminator PSE or the terminator DSE is of a different organism species than the second organism species; and wherein the terminator comprises a terminator PSE sequence and a terminator DSE sequence, and wherein the either the terminator PSE or the terminator DSE is of a different snRNA than the second snRNA. In some embodiments, the promoter comprises a promoter PSE sequence and a promoter DSE sequence, and wherein the either the promoter PSE or the promoter DSE is of a different organism species than the first organism species; and wherein the promoter comprises a promoter PSE sequence and a promoter DSE sequence, and wherein the either the promoter PSE or the promoter DSE is of a different snRNA than the first snRNA; wherein the terminator comprises a terminator PSE sequence and a terminator DSE sequence, and wherein the either the terminator PSE or the terminator DSE is of a different organism species than the second organism species; and wherein the terminator comprises a terminator PSE sequence and a terminator DSE sequence, and wherein the either the terminator PSE or the terminator DSE is of a different snRNA than the second snRNA. In some embodiments, the promoter sequence comprises a promoter sequence in Table 5, or a variant thereof. In some embodiments, the terminator sequence comprises a terminator sequence in Table 5, or a variant thereof. In some embodiments, the promoter DSE or promoter PSE comprises a promoter DSE or promoter PSE of a promoter in Table 5, or a variant thereof. In some embodiments, the terminator DSE or terminator PSE comprises a terminator DSE or terminator PSE of a terminator in Table 5, or a variant thereof.

[0180] Described herein, in some embodiments, are nucleic acid expression systems, comprising: a promoter sequence comprising a mouse U1 snRNA (“MmU1”) promoter sequence, a mouse U2 snRNA (“MmU2”) promoter sequence, a mouse U3 snRNA (“MmU3”) promoter sequence, a mouse U4 snRNA (“MmU4”) promoter sequence, a mouse U5 snRNA (“MmU5”) promoter sequence, a mouse U6 snRNA (“MmU6”) promoter sequence, a mouse U7 snRNA (“MmU7”) promoter sequence, a mouse U11 snRNA (“MmU11”) promoter sequence, a mouse U12 snRNA (“MmU12”) promoter sequence, a mouse U7SK snRNA (“MmU7SK”) promoter sequence, a human U1 snRNA (“HsU1”) promoter sequence, a human U2 snRNA (“HsU2”) promoter sequence, a human U3 snRNA (“HsU3”) promoter sequence, a human U4 snRNA (“HsU4”) promoter sequence, a human U5 snRNA (“HsU5”) promoter sequence, a human U6 snRNA (“HsU6”) promoter sequence, a human U7 snRNA (“HsU7”) promoter sequence, a human U11 snRNA (“HsU11”) promoter sequence, a human U12 snRNA (“HsU12”) promoter sequence, or a human U7SK snRNA (“HsU7SK”) promoter sequence, or a fragment or combination of fragments thereof; and a transcribable region operably coupled to the promoter sequence and to a terminator sequence comprising a mouse U1 snRNA (“MmU1”) terminator sequence, a mouse U2 snRNA (“MmU2”) terminator sequence, a mouse U3 snRNA (“MmU3”) terminator sequence, a mouse U4 snRNA (“MmU4”) terminator sequence, a mouse U5 snRNA (“MmU5”) terminator sequence, a mouse U6 snRNA (“MmU6”) terminator sequence, a mouse U7 snRNA (“MmU7”) terminator sequence, a mouse U11 snRNA (“MmU11”) terminator sequence, a mouse U12 snRNA (“MmU12”) terminator sequence, a mouse U7SK snRNA (“MmU7SK”) terminator sequence, a human U1 snRNA (“HsU1”) terminator sequence, a human U2 snRNA (“HsU2”) terminator sequence, a human U3 snRNA (“HsU3”) terminator sequence, a human U4 snRNA (“HsU4”) terminator sequence, a human U5 snRNA (“HsU5”) terminator sequence, a human U6 snRNA (“HsU6”) terminator sequence, a human U7 snRNA (“HsU7”) terminator sequence, a human U11 snRNA (“HsU11”) terminator sequence, a human U12 snRNA (“HsU12”) terminator sequence, or a human U7SK snRNA (“HsU7SK”) terminator sequence, or a fragment or combination of fragments thereof; wherein the promoter sequence and the terminator sequence are at least partially of a different organism species as each other, or are at least partially of a different snRNA as each other. In some embodiments, the promoter sequence and the terminator sequence are at least partially of a different organism species as each other, and are at least partially of a different snRNA as each other. In some embodiments, the promoter comprises a promoter PSE sequence and a promoter DSE sequence, and wherein the either the promoter PSE or the promoter DSE is of a different organism species than the first organism species. In some embodiments, the promoter comprises a promoter PSE sequence and a promoter DSE sequence, and wherein the either the promoter PSE or the promoter DSE is of a different snRNA than the first snRNA. In some embodiments, the promoter comprises a promoter PSE sequence and a promoter DSE sequence, and wherein the either the promoter PSE or the promoter DSE is of a different organism species than the first organism species; and wherein the promoter comprises a promoter PSE sequence and a promoter DSE sequence, and wherein the either the promoter PSE or the promoter DSE is of a different snRNA than the first snRNA. In some embodiments, the terminator comprises a terminator PSE sequence and a terminator DSE sequence, and wherein the either the terminator PSE or the terminator DSE is of a different organism species than the second organism species. In some embodiments, the terminator comprises a terminator PSE sequence and a terminator DSE sequence, and wherein the either the terminator PSE or the terminator DSE is of a different snRNA than the second snRNA. In some embodiments, the terminator comprises a terminator PSE sequence and a terminator DSE sequence, and wherein the either the terminator PSE or the terminator DSE is of a different organism species than the second organism species; and wherein the terminator comprises a terminator PSE sequence and a terminator DSE sequence, and wherein the either the terminator PSE or the terminator DSE is of a different snRNA than the second snRNA. In some embodiments, the promoter comprises a promoter PSE sequence and a promoter DSE sequence, and wherein the either the promoter PSE or the promoter DSE is of a different organism species than the first organism species; and wherein the promoter comprises a promoter PSE sequence and a promoter DSE sequence, and wherein the either the promoter PSE or the promoter DSE is of a different snRNA than the first snRNA; wherein the terminator comprises a terminator PSE sequence and a terminator DSE sequence, and wherein the either the terminator PSE or the terminator DSE is of a different organism species than the second organism species; and wherein the terminator comprises a terminator PSE sequence and a terminator DSE sequence, and wherein the either the terminator PSE or the terminator DSE is of a different snRNA than the second snRNA. In some embodiments, the promoter sequence comprises a promoter sequence in Table 5, or a variant thereof. In some embodiments, the terminator sequence comprises a terminator sequence in Table 5, or a variant thereof. In some embodiments, the promoter DSE or promoter PSE comprises a promoter DSE or promoter PSE of a promoter in Table 5, or a variant thereof. In some embodiments, the terminator DSE or terminator PSE comprises a terminator DSE or terminator PSE of a terminator in Table 5, or a variant thereof.

[0181] Described herein, in some embodiments, is a nucleic acid expression system. In some embodiments, the nucleic acid expression system may include a promoter sequence. In some embodiments, the promoter sequence may include a mouse U7 snRNA (“Mm U7”) promoter sequence. In some embodiments, the promoter sequence may include a human U7 snRNA (“Hs U7”) promoter sequence. In some embodiments, the promoter sequence may include a mouse U1a1 (“mu1a1”) promoter sequence. In some embodiments, the promoter sequence may include a human U1-1 (“HU1” or “Hs U1-1”) promoter sequence. In some embodiments, the promoter sequence may include a fragment of the promoters listed above. In some embodiments, the promoter sequence may include a combination of fragments listed above. In some embodiments, the nucleic acid expression system may include a transcribable region operably coupled to the promoter sequence. In some embodiments, the nucleic acid expression system may include a transcribable region operably coupled to a terminator sequence. In some embodiments, the nucleic acid expression system may include a transcribable region operably coupled to the promoter sequence and a terminator sequence. In some embodiments, the terminator sequence may include a Mm U7 terminator sequence. In some embodiments, the terminator sequence may include a Hs U7 terminator sequence. In some embodiments, the terminator sequence may include a mu1a1 terminator sequence. In some embodiments, the terminator sequence may include a HU1 terminator sequence. In some embodiments, the terminator sequence may include a fragment of the terminators listed above. In some embodiments, the terminator sequence may include a combination of fragments of the terminators listed above. In some embodiments, when the promoter sequence comprises the Mm U7 promoter sequence or a fragment thereof, the terminator sequence does not comprise the Mm U7 terminator sequence or a fragment thereof. In some embodiments, when the promoter sequence comprises the Hs U7 promoter sequence or a fragment thereof, the terminator sequence does not comprise the Hs U7 terminator sequence or a fragment thereof. In some embodiments, when the promoter sequence comprises the mu1a1 promoter sequence or a fragment thereof, the terminator sequence does not comprise the mu1a1 terminator sequence or a fragment thereof. In some embodiments, when the promoter sequence comprises the HU1 promoter sequence or a fragment thereof, the terminator sequence does not comprise the HU1 terminator sequence or a fragment thereof.

[0182] Described herein, in some embodiments, is a nucleic acid system comprised of a promoter sequence comprised of a mouse U7 snRNA (“Mm U7”) promoter sequence, a human U7 snRNA (“Hs U7”) promoter sequence, a mouse U1a1 (“mu1a1”) promoter sequence, or a human U1-1 (“HU1” or “Hs U1-1”) promoter sequence, or a fragment or combination of fragments thereof; and a transcribable region operably coupled to the promoter sequence and to a terminator sequence comprised of a Mm U7 terminator sequence, a Hs U7 terminator sequence, a mu1a1 terminator sequence, or a HU1 terminator sequence, or a fragment or combination of fragments thereof, wherein: when the promoter sequence comprises the Mm U7 promoter sequence or a fragment thereof, the terminator sequence does not comprise the Mm U7 terminator sequence or a fragment thereof, when the promoter sequence comprises the Hs U7 promoter sequence or a fragment thereof, the terminator sequence does not comprise the Hs U7 terminator sequence or a fragment thereof, when the promoter sequence comprises the mu1a1 promoter sequence or a fragment thereof, the terminator sequence does not comprise the mu1a1 terminator sequence or a fragment thereof, and when the promoter sequence comprises the HU1 promoter sequence or a fragment thereof, the terminator sequence does not comprise the HU1 terminator sequence or a fragment thereof.

[0183] Described herein, in some embodiments, is a method of producing a ribonucleic acid (RNA). In some embodiments, the method comprises contacting a cell with an expression system. In some embodiments, the expression system is a virus. In some embodiments, the virus is an adeno-associated virus (AAV). In some embodiments, the expression system may include a regulatory sequence operably coupled to a transcribable region of a nucleic acid. In some embodiments, the regulatory sequence may include a proximal regulatory sequence element (PSE). In some embodiments, the regulatory sequence may include a distal regulatory sequence element (DSE). In some embodiments, the regulatory sequence may include a PSE and a DSE. In some embodiments, the PSE may include a mouse U7 snRNA (“Mm U7”) PSE. In some embodiments, the PSE may include a human U7 snRNA (“Hs U7”) PSE. In some embodiments, the PSE may include a mouse U1a1 (“mu1a1”) PSE. In some embodiments, the PSE may include a human U1-1 (“HU1” or “Hs U1-1”) PSE. In some embodiments, the DSE may include a Mm U7 DSE. In some embodiments, the DSE may include a Hs U7 DSE. In some embodiments, the DSE may include a mu1a1 DSE. In some embodiments, the DSE may include a HU1 DSE. In some embodiments, when the PSE comprises the Mm U7 PSE, the DSE does not comprise the Mm U7 DSE. In some embodiments, when the PSE comprises the Hs U7 PSE, the DSE does not comprise the Hs U7 DSE. In some embodiments, when the PSE comprises the mu1a1 PSE, the DSE does not comprise the mu1a1 DSE. In some embodiments, when the PSE comprises the HU1 PSE, the DSE does not comprise the HU1 DSE. In some embodiments, the regulatory sequence may include a promoter sequence. In some embodiments, the regulatory sequence may include a terminator sequence. In some embodiments, the regulatory sequence may include a promoter sequence and a terminator sequence.

[0184] Described herein, in some embodiments, is a method for producing a ribonucleic acid (RNA), comprised of contacting a cell with an expression system comprised of a regulatory sequence operably coupled to a transcribable region of a nucleic acid, the regulatory sequence comprised of a proximal regulatory sequence element (PSE) and a distal regulatory sequence element (DSE); wherein the PSE is comprised of a mouse U7 snRNA (“Mm U7”) PSE, a human U7 snRNA (“Hs U7”) PSE, a mouse U1a1 (“mu1a1”) PSE, or a human U1-1 (“HU1” or “Hs U1-1”) PSE; and wherein the PSE is comprised of a Mm U7 DSE, a Hs U7 DSE, a mu1a1 DSE, or a HU1 DSE, wherein: when the PSE comprises the Mm U7 PSE, the DSE does not comprise the Mm U7 DSE, when the PSE comprises the Hs U7 PSE, the DSE does not comprise the Hs U7 DSE, when the PSE comprises the mu1a1 PSE, the DSE does not comprise the mu1a1 DSE, and when the PSE comprises the HU1 PSE, the DSE does not comprise the HU1 DSE.

[0185] Described herein, in some embodiments, is a nucleic system. In some embodiments, the nucleic acid system may include a transcribable region. In some embodiments, the transcribable region may include an exonic splicing silencer (ESS) nucleic acid sequence. In some embodiments, the transcribable region may include an exonic splicing enhancer (ESE) nucleic acid sequence. In some embodiments, the transcribable region may include a target nucleic acid sequence. In some embodiments, the target nucleic acid sequence may be targeting a target ribonucleic acid (RNA). In some embodiments, the transcribable region may include a nucleic acid coding sequence (CDS).

[0186] In some embodiments, the nucleic acid expression system may produce a greater amount of RNA from the transcribable region than an expression system having a wild-type promoter sequence operably coupled to the transcribable region. In some embodiments, the nucleic acid expression system may produce a greater amount of RNA from the transcribable region than an expression system having a wild-type terminator sequence 3′ to the transcribable region. In some embodiments, the amount of RNA produced is at least 1% greater. In some embodiments, the amount of RNA produced is at least 2% greater. In some embodiments, the amount of RNA produced is at least 3% greater. In some embodiments, the amount of RNA produced is at least 4% greater. In some embodiments, the amount of RNA produced is at least 5% greater. In some embodiments, the amount of RNA produced is at least 10% greater. In some embodiments, the amount of RNA produced is at least 20% greater. In some embodiments, the amount of RNA produced is at least 30% greater. In some embodiments, the amount of RNA produced is at least 40% greater. In some embodiments, the amount of RNA produced is at least 50% greater. In some embodiments, the amount of RNA produced is at least 60% greater. In some embodiments, the amount of RNA produced is at least 70% greater. In some embodiments, the amount of RNA produced is at least 80% greater. In some embodiments, the amount of RNA produced is at least 90% greater. In some embodiments, the amount of RNA produced is at least 100% greater. In some embodiments, the amount of RNA produced is at least 150% greater. In some embodiments, the amount of RNA produced is at least 200% greater. In some embodiments, the amount of RNA produced is at least 250% greater. In some embodiments, the amount of RNA produced is at least 300% greater. In some embodiments, the amount of RNA produced is at least 350% greater. In some embodiments, the amount of RNA produced is at least 400% greater. In some embodiments, the amount of RNA produced is at least 450% greater. In some embodiments, the amount of RNA produced is at least 500% greater.

[0187] In some embodiments, the expression system may produce RNA from the transcribable region at a greater rate than an expression system having a wild-type promoter sequence operably coupled to the transcribable region. In some embodiments, the expression system may produce RNA from the transcribable region at a greater rate than an expression system having a wild-type terminator sequence 3′ to the transcribable region. In some embodiments, the greater rate of RNA produced is at least 1% greater. In some embodiments, the greater rate of RNA produced is at least 2% greater. In some embodiments, the greater rate of RNA produced is at least 3% greater. In some embodiments, the greater rate of RNA produced is at least 4% greater. In some embodiments, the greater rate of RNA produced is at least 5% greater. In some embodiments, the greater rate of RNA produced is at least 10% greater. In some embodiments, the greater rate of RNA produced is at least 20% greater. In some embodiments, the greater rate of RNA produced is at least 30% greater. In some embodiments, the greater rate of RNA produced is at least 40% greater. In some embodiments, the greater rate of RNA produced is at least 50% greater. In some embodiments, the greater rate of RNA produced is at least 60% greater. In some embodiments, the greater rate of RNA produced is at least 70% greater. In some embodiments, the greater rate of RNA produced is at least 80% greater. In some embodiments, the greater rate of RNA produced is at least 90% greater. In some embodiments, the greater rate of RNA produced is at least 100% greater. In some embodiments, the greater rate of RNA produced is at least 150% greater. In some embodiments, the greater rate of RNA produced is at least 200% greater. In some embodiments, the greater rate of RNA produced is at least 250% greater. In some embodiments, the greater rate of RNA produced is at least 300% greater. In some embodiments, the greater rate of RNA produced is at least 350% greater. In some embodiments, the greater rate of RNA produced is at least 400% greater. In some embodiments, the greater rate of RNA produced is at least 450% greater. In some embodiments, the greater rate of RNA produced is at least 500% greater.

### Compositions

[0188] Disclosed herein, in some embodiments, are compositions. The composition may be a pharmaceutical composition. The composition may include RNAs such as recombinant or modified U7 snRNA sequences described herein, or an expression construct. The composition may include an expression construct encoding a recombinant or modified U7 snRNA. The composition may include a viral vector.

[0189] Described herein, in some embodiments, the components of the system may be combined together within a single nucleic acid. In some embodiments, the components are separated among multiple nucleic acids.

[0190] In some embodiments, a pharmaceutical composition comprising the system and a pharmaceutically acceptable carrier is described. A composition may include a carrier such as a pharmaceutically acceptable carrier. Examples of carriers may include a solution such as water, a buffer, or saline, or a lipid composition.

[0191] The composition may include a delivery agent such as a virus, liposome, or nanoparticle. In some embodiments, the composition includes a delivery agent. In some embodiments, the delivery agent includes a virus. In some embodiments, the delivery agent includes a liposome. In some embodiments, the delivery agent includes a nanoparticle.

[0192] A virus may include the nucleic acid system. In some embodiments, the virus is a parvovirus. An example of a parvovirus may include a dependoparvovirus. An example of a dependoparvovirus may include an adeno-associated virus (AAV). In some embodiments, the virus may be an adeno-associated virus (AAV). In some embodiments, the AAV is a self-complementary AAV. In some embodiments, the AAV is a single-strand AAV. In some embodiments, the AAV may be serotype AAV1. In some embodiments, the AAV may be serotype AAV2. In some embodiments, the AAV may be serotype AAV4. In some embodiments, the AAV may be serotype AAV5. In some embodiments, the AAV may be serotype AAV6. In some embodiments, the AAV may be serotype AAV7. In some embodiments, the AAV may be serotype AAV8. In some embodiments, the AAV may be serotype AAV9.

[0193] In some embodiments, the, AAV may express one U7 cassette. Gene cassettes may include small mobile elements, consisting of a single gene and a recombination site, which may be integrated into larger elements called integrons. Several gene cassettes can be inserted into the same integrin forming a tandem array where cassettes can be expressed together. In some embodiments, the AAV may express an array of two U7 cassettes. In some embodiments, the AAV may express an array of three U7 cassettes. In some embodiments, the AAV may express an array of four U7 cassettes. In some embodiments, the AAV may express an array of five U7 cassettes. In some embodiments, the AAV may express at least one U7 cassette. In some embodiments, the AAV may express an array of at least two U7 cassettes. In some embodiments, the AAV may express an array of at least three U7 cassettes. In some embodiments, the AAV may express an array of at least four U7 cassettes. In some embodiments, the AAV may express an array of at least five U7 cassettes. In some embodiments, the AAV may express at most one U7 cassette. In some embodiments, the AAV may express an array of at most two U7 cassettes. In some embodiments, the AAV may express an array of at most three U7 cassettes. In some embodiments, the AAV may express an array of at most four U7 cassettes. In some embodiments, the AAV may express an array of at most five U7 cassettes.

[0194] Disclosed herein, in some embodiments, are viral particles, comprising a polynucleotide comprising one or more copies of a cassette comprising a promoter, a coding sequence, and a terminator sequence, wherein the coding sequence comprises a nucleic acid sequence having at least 80%, at least 85%, at least 90%, at least 95%, at least 98%, at least 99%, or 100% identity to the nucleic acid sequence of any one of SEQ ID NOs: 364-566. In some embodiments, the viral particle is an AAV viral particle. In some embodiments, the polynucleotide comprises 2, 3, or 4 copies of the cassette.

[0195] In some embodiments, a cell comprises the system (e.g. modified U7 snRNA). For example, the system may be delivered to a cell. The system may be delivered to the cell in vivo. The system may be delivered to the cell in vitro. The system may be administered to a subject, and thereby enter a cell of the subject. In some embodiments, the cell is a brain cell. In some embodiments, the cell is a neural cell. In some embodiments, the cell is a neuron.

[0196] In some embodiments, a tissue or biofluid of a subject comprises the system (e.g. modified U7 snRNA). For example, the system may be delivered to a tissue or biofluid. The system may be delivered to the tissue or biofluid in vivo. The system may be delivered to the tissue or biofluid in vitro. The system may be administered to a subject, and thereby enter a tissue or biofluid of the subject. In some embodiments, the tissue includes neural tissue. In some embodiments, the tissue includes brain tissue. In some embodiments, the tissue includes nerve tissue. In some embodiments, the biofluid includes blood. In some embodiments, the biofluid includes serum. In some embodiments, the biofluid includes serum.

### Methods of Use

[0197] Described herein, in some embodiments, are methods. The method may include administering a composition or system described herein. The method may include delivering a composition or system described herein in a cell. The method may include expressing a composition or system described herein in a cell. The cell may be in vivo (e.g. in a living body). The cell may be in vitro. The method may include a method of treatment. The method may include modifying splicing of a target nucleic acid such as an SCN1A RNA. The method may be performed on a subject, or on a cell such as a cell of a subject.

[0198] Described herein, in some embodiments, is a method comprising administering a pharmaceutical composition. In some embodiments, the pharmaceutical composition comprises a virus. The composition or virus may be modified. The composition or virus may be recombinant. In some embodiments, the pharmaceutical composition comprises a virus that is an adeno-associated virus (AAV). In some embodiments, the virus comprises a promoter, an exonic splicing silencer sequence, a U7 targeting sequence, a smOPT, a U7 3′ hairpin structure, and a 3′ terminal sequence. Described herein, in some embodiments, is a method comprised of administering a pharmaceutical composition or virus comprised of the nucleic acid system.

[0199] The method may be used to treat or modify splicing in a subject. The method may include administering a composition to a subject. The method may be used to treat a cell. The method may include administering a composition to a cell. The cell may be a brain cell. The cell may be a neural cell. The cell may be a neuron.

[0200] In some embodiments, the cell is in a subject. In some embodiments, the subject is an animal. In some embodiments, the subject is a vertebrate. In some embodiments, the subject is a mammal. In some embodiments, the subject is a human.

[0201] In some embodiments, the subject may have one mutated copy of a gene that encodes a target RNA per cell. In some embodiments, the subject may have two mutated copies of a gene that encodes a target RNA per cell. In some embodiments, the subject may have no mutated copies of a gene that encodes a target RNA per cell. A mutated copy of a gene that encodes a target RNA may lead to splicing that includes an alternatively spliced exon of the gene that encodes a target RNA. A mutated copy of a gene that encodes a target RNA may result in nonsense mediated decay (NMD) of a target mRNA.

[0202] In some embodiments, the subject may have one mutated copy of SCN1A DNA per cell. In some embodiments, the subject may have two mutated copies of SCN1A DNA per cell. In some embodiments, the subject may have no mutated copies of SCN1A DNA per cell. A mutated copy of SCN1A DNA may lead to splicing that includes an alternatively spliced exon of the SCN1A. A mutated copy of SCN1A DNA may result in nonsense mediated decay (NMD) of an SCN1A mRNA.

### Modifying Splicing

[0203] Described herein, in some embodiments, is a method for modifying splicing. The method may include modifying splicing in a subject. The method may include modifying splicing in a cell. In some embodiments, the method may include contacting a pre-mRNA with a system or composition herein. In some embodiments, the method may include contacting a pre-mRNA. The pre-mRNA may be a target RNA. In some embodiments, the pre-mRNA is or includes a target pre-mRNA. The method may include contacting a target pre-mRNA with a recombinant nucleic acid sequence that induces exclusion of an exon (e.g. an alternative exon) from a mature mRNA generated by the target pre-mRNA. Described herein, in some embodiments, is a method of modifying splicing comprised of contacting a target pre-mRNA with a recombinant nucleic acid sequence that induces exclusion of an exon such as an alternative exon from a mature mRNA generated by the target pre-mRNA.

[0204] In some embodiments, the pre-mRNA may encode an SCN1A protein. In some embodiments, the method may include contacting a pre-mRNA encoding an SCN1A protein with a recombinant nucleic acid sequence that induces exclusion of exon 20N from a mature mRNA generated by the pre-mRNA. Described herein, in some embodiments, is a method of modifying splicing comprised of contacting a pre-mRNA encoding an SCN1A protein with a recombinant nucleic acid sequence that induces exclusion of exon 20N from a mature mRNA generated by the pre-mRNA.

[0205] In some embodiments, the pre-mRNA is in a cell. In some embodiments, the pre-mRNA is in a neural cell. The cell may be a brain cell. The cell may be a neuron.

[0206] In some embodiments, the subject has epilepsy. In some embodiments, the subject is at risk of having epilepsy. Epilepsy is a chronic noncommunicable disease of the brain that affects around 50 million people worldwide. Epilepsy can be characterized by recurrent seizures, which are brief episodes of involuntary movement that may involve a part of the body (partial) or the entire body (generalized) and are sometimes accompanied by loss of consciousness and control of bowel or bladder function. In some embodiments, the subject may suffer from tonic-clonic seizures. In some embodiments, the subject may suffer from myoclonic seizures. In some embodiments, the subject may suffer from atypical absence seizures. In some embodiments, the subject may suffer from atonic seizures. In some embodiments, the subject may suffer from focal aware or impaired awareness seizures. In some embodiments, the subject may suffer from tonic seizures. In some embodiments, the subject may suffer from non-convulsive status epilepticus. In some embodiments, the subject may be at risk of having tonic-clonic seizures. In some embodiments, the subject is at risk of having myoclonic seizures. In some embodiments, the subject may be at risk of having atypical absence seizures. In some embodiments, the subject may be at risk of having atonic seizures. In some embodiments, the subject may be at risk of having focal aware or impaired awareness seizures. In some embodiments, the subject may be at risk of having tonic seizures. In some embodiments, the subject may be at risk of having non-convulsive status epilepticus seizures.

[0207] In some embodiments, the subject has a genetic disorder such as Dravet syndrome. In some embodiments, the subject is at risk of having a genetic disorder such as Dravet syndrome. In some embodiments, the subject has some level of developmental disability. In some embodiments, the subject has a crouched gait while walking. In some embodiments, the subject is at risk of having some level of developmental disability. In some embodiments, the subject is at risk of having a crouched gait while walking. In some embodiments, the subject has or is at risk of having a genetic disorder such as Dravet syndrome.

[0208] Described herein, in some embodiments, is a method of preventing, reducing or inhibiting nonsense-mediated decay (NMD). The NMD may be prevented. The NMD may be reduced. The NMD may be inhibited. The NMD may be prevented, reduced, or inhibited in a subject. The NMD may be prevented, reduced, or inhibited in a cell of a subject. The NMD may be prevented, reduced, or inhibited with regard to a target transcript (e.g. a SCN1A transcript). Some embodiments include preventing, reducing or inhibiting nonsense-mediated decay (NMD) by contacting a target pre-mRNA (e.g. an SCN1A pre-mRNA) with a composition or system described herein, such as a modified U7 snRNA. Some embodiments include preventing, reducing or inhibiting nonsense-mediated decay (NMD) by administering composition or system described herein to a subject. The prevention, reduction, or inhibition may be relative to a baseline or control.

[0209] Some embodiments include reducing or inhibiting NMD in cells (e.g. cells of a subject) by at least 10%. Some embodiments include reducing or inhibiting NMD in cells by at least 20%. Some embodiments include reducing or inhibiting NMD in cells by at least 30%. Some embodiments include reducing or inhibiting NMD in cells by at least 40%. Some embodiments include reducing or inhibiting NMD in cells by at least 50%. Some embodiments include reducing or inhibiting NMD in cells by at least 60%. Some embodiments include reducing or inhibiting NMD in cells by at least 70%. Some embodiments include reducing or inhibiting NMD in cells by at least 80%. Some embodiments include reducing or inhibiting NMD in cells by at least 90%. Some embodiments include reducing or inhibiting NMD in cells by less than 10%. Some embodiments include reducing or inhibiting NMD in cells by less than 20%. Some embodiments include reducing or inhibiting NMD in cells by less than 30%. Some embodiments include reducing or inhibiting NMD in cells by less than 40%. Some embodiments include reducing or inhibiting NMD in cells by less than 50%. Some embodiments include reducing or inhibiting NMD in cells by less than 60%. Some embodiments include reducing or inhibiting NMD in cells by less than 70%. Some embodiments include reducing or inhibiting NMD in cells by less than 80%. Some embodiments include reducing or inhibiting NMD in cells by less than 90%. Some embodiments include reducing or inhibiting NMD in cells by less than 95%. Some embodiments include reducing or inhibiting NMD in cells by less than 100%. Some embodiments include a range of any of the above percentages.

[0210] Described herein, in some embodiments, is a method comprised of administering to the subject a composition that silences or reduces said splicing, the composition comprising the system, virus, or composition described above. In some embodiments, the method comprises administering to the subject a composition that silences the splicing. In some embodiments, the method comprises administering to the subject a composition that reduces the splicing.

[0211] In some embodiments, the method may increase an amount of a productive isoform of a target RNA, or a productive isoform of a protein encoded by the target RNA. In some embodiments, the increase in the amount of a productive isoform of a target RNA or protein encoded by the target RNA is relative to a control. In some embodiments, the increase in the amount of a productive isoform of a target RNA or protein encoded by the target RNA is relative to a baseline amount of said productive isoform. In some embodiments, the method increases an amount of a productive isoform of a target RNA or protein encoded by the target RNA, relative to a control or baseline amount of said productive isoform.

[0212] In some embodiments, the method may increase an amount of a productive isoform of SCN1A mRNA. In some embodiments, the increase in the amount of a productive isoform of SCN1A mRNA is relative to a control. In some embodiments, the increase in the amount of a productive isoform of SCN1A mRNA is relative to a baseline amount of said productive isoform. In some embodiments, the method increases an amount of a productive isoform of SCN1A mRNA, relative to a control or baseline amount of said productive isoform.

[0213] In some embodiments, the method may increase an amount of a protein encoded by a target RNA. In some embodiments, the method may increase an amount of a protein encoded by a target RNA, relative to a control. In some embodiments, the method may increase an amount of a protein encoded by a target RNA, relative to a baseline amount of the protein encoded by a target RNA. In some embodiments, the method increases an amount of a protein encoded by a target RNA, relative to a control or baseline amount of the protein encoded by the target RNA. The improvement may be by at least 10%.

[0214] In some embodiments, the method may increase an amount of a NaV1.1 channel or protein (e.g. SCN1A protein). In some embodiments, the method may increase an amount of a NaV1.1 channel or protein (e.g. SCN1A protein), relative to a control. In some embodiments, the method may increase an amount of a NaV1.1 channel or protein (e.g. SCN1A protein), relative to a baseline amount of the NaV1.1 channel or protein. In some embodiments, the method increases an amount of a NaV1.1 channel or protein (e.g. SCN1A protein), relative to a control or baseline amount of the NaV1.1 channel or protein. The improvement may be by at least 10%.

[0215] In some embodiments, the method improves sodium transport. In some embodiments, the method improves sodium transport relative to a control. In some embodiments, the method improves sodium transport relative to a baseline amount. In some embodiments, the method improves sodium transport, relative to a control or baseline amount. The improvement may be by at least 10%.

[0216] Some embodiments relate to or include a method of reducing an amount of a non-productive target transcript (e.g. a SCN1A transcript). The non-productive target transcript may include a mature target mRNA that includes an exon such as an alternative exon (e.g. alternative exon 20N of an SCN1A mRNA). The amount of non-productive target transcript may be reduced in a cell or subject. The amount of non-productive target transcript may be reduced relative to a baseline measurement. The amount of non-productive target transcript may be reduced relative to a control measurement. The amount of non-productive target transcript may be reduced by at least 10%, by at least 20%, by at least 30%, by at least 40%, by at least 50%, by at least 60%, by at least 70%, by at least 80%, or by at least 90%. In some embodiments, the amount of non-productive target transcript is reduced by less than 10%, by less than 20%, by less than 30%, by less than 40%, by less than 50%, by less than 60%, by less than 70%, by less than 80%, by less than 90%, or by less than 100%. The amount of non-productive target transcript may be reduced by a range of percentages herein.

[0217] The amount of non-productive target transcript (e.g. a SCN1A transcript) may be measured in a sample of a subject. The sample may include a biofluid such as blood, serum, plasma, or cerebrospinal fluid, or may include a tissue sample such as neural or brain tissue. The baseline amount of non-productive target transcript may be measured in a baseline sample obtained before treatment of the subject (e.g. before administration of a composition herein to the subject). The amount of productive target transcript may be measured with an assay method such as a PCR assay. Examples of PCR assays may include quantitative PCR (qPCR) or reverse transcription quantitative PCR (RT-qPCR). The amount of non-productive target transcript may be normalized to a control, such as a measurement of a housekeeping mRNA.

[0218] Some embodiments relate to or include a method of increasing an amount of a productive target transcript (e.g. a SCN1A transcript). The productive target transcript may include a mature target mRNA that does not include an exon such as an alternative exon (e.g. alternative exon 20N of an SCN1A mRNA). The amount of productive target transcript may be increased in a cell or subject. The amount of productive target transcript may be increased relative to a baseline measurement. The amount of productive target transcript may be increased relative to a control measurement. The amount of productive target transcript may be increased by at least 10%, by at least 20%, by at least 30%, by at least 40%, by at least 50%, by at least 60%, by at least 70%, by at least 80%, by at least 90%, by at least 100%, by at least 125%, by at least 150%, by at least 175%, by at least 200%, by at least 225%, or by at least 250%. In some embodiments, the amount of productive target transcript is increased by less than 10%, by less than 20%, by less than 30%, by less than 40%, by less than 50%, by less than 60%, by less than 70%, by less than 80%, by less than 90%, by less than 100%, by less than 125%, by less than 150%, by less than 175%, by less than 200%, by less than 225%, by less than 250%, by less than 275%, by less than 300%, by less than 350%, or by less than 400%. The amount of productive target transcript may be increased by a range of percentages herein.

[0219] The amount of productive target transcript (e.g. a SCN1A transcript) may be measured in a sample of a subject. The sample may include a biofluid such as blood, serum, plasma, or cerebrospinal fluid, or may include a tissue sample such as neural or brain tissue. The baseline amount of productive target transcript may be measured in a baseline sample obtained before treatment of the subject. The amount of productive target transcript may be measured with an assay method such as a PCR assay. The amount of productive target transcript may be normalized to a control, such as a measurement of a housekeeping mRNA.

[0220] Some embodiments relate to or include a method of increasing an amount of a protein encoded by a target transcript (e.g. a NaV1.1 protein encoded by a SCN1A transcript). The amount of the protein encoded by the target transcript may be increased in a cell or subject. The amount of the protein encoded by the target transcript may be increased relative to a baseline measurement. The amount of the protein encoded by the target transcript may be increased relative to a control measurement. The amount of the protein encoded by the target transcript may be increased by at least 10%, by at least 20%, by at least 30%, by at least 40%, by at least 50%, by at least 60%, by at least 70%, by at least 80%, by at least 90%, by at least 100%, by at least 125%, by at least 150%, or by at least 160%. In some embodiments, the amount of the protein encoded by the target transcript is increased by less than 10%, by less than 20%, by less than 30%, by less than 40%, by less than 50%, by less than 60%, by less than 70%, by less than 80%, by less than 90%, by less than 100%, by less than 125%, by less than 150%, by less than 160%, by less than 175%, or by less than 200%. The amount of the protein encoded by the target transcript may be increased by a range of percentages herein.

[0221] The amount of a protein encoded by a target transcript (e.g. a NaV1.1 protein encoded by a SCN1A transcript) may be measured in a sample of a subject. The sample may include a biofluid such as blood, serum, plasma, or cerebrospinal fluid, or may include a tissue sample such as neural or brain tissue. The baseline amount of the protein encoded by the target transcript may be measured in a baseline sample obtained before treatment of the subject. The amount of the protein encoded by the target transcript may be measured with an assay method such as an immunoblot. The amount of the protein encoded by the target transcript may be normalized to a control, such as a measurement of total protein or of a housekeeping protein.

### Treating a Disorder

[0222] Described herein, in some embodiments, is a method for treating a disorder in a subject in need thereof. In some embodiments, the subject has the disorder. In some embodiments, the subject is identified as having the disorder. In some embodiments, the subject is at risk of having the disorder. In some embodiments, the subject is identified as at risk of having the disorder. The treatment may have a prophylactic effect. The method may include any aspect of another method described herein, such as modifying splicing, reducing an amount of a non-productive target transcript (e.g. a SCN1A transcript) relative to a baseline or control measurement, increasing an amount of a non-productive target transcript relative to a baseline or control measurement, or increasing an amount of protein encoded by the target transcript relative to a baseline or control measurement.

[0223] The disorder may be or include a genetic disorder. In some embodiments, the subject has or is at risk of having a genetic disorder. The disorder may be or include a neurodevelopmental disorder. In some embodiments, the subject has or is at risk of having a neurodevelopmental disorder. In some embodiments, the neurodevelopmental disorder comprises an intellectual disability or epilepsy. The disorder may include an intellectual disability. The disorder may include epilepsy. The disorder may include Dravet syndrome.

[0224] Described herein, in some embodiments, is a method for preventing a disorder in a subject in need thereof. Described herein, in some embodiments, is a method for treating a disorder in a subject in need thereof. In some embodiments, the method comprises administering a therapeutically effective amount of a synthetic composition that may silence splicing of an alternatively spliced region of a ribonucleic acid (RNA). In some embodiments, the method comprises administering a therapeutically effective amount of a synthetic composition that may reduce splicing of an alternatively spliced region of RNA. In some embodiments, the method comprises administering a therapeutically effective amount of a synthetic composition that may silence splicing of an alternatively spliced region of a target RNA (e.g. an RNA encoding SCN1A). In some embodiments, the method comprises administering a therapeutically effective amount of a synthetic composition that may reduce splicing of an alternatively spliced region of a target RNA (e.g. an RNA encoding SCN1A). In some embodiments, the alternatively spliced region may include an exon. In some embodiments, the alternatively spliced region may include a NMD exon (e.g. 20N of an SCN1A RNA) of the RNA.

[0225] Described herein, in some embodiments, is a method of treating or preventing a neurodevelopmental disorder in a subject in need thereof, comprising administering a therapeutically effective amount of a recombinant U7 small nuclear RNA (snRNA) composition that silences or reduces splicing of an alternatively spliced region of a target RNA (e.g. a SCN1A SCN1A). In some embodiments, the neurodevelopmental disorder comprises an intellectual disability or epilepsy.

[0226] In some embodiments, the administration may increase the amount of a productive isoform of a target RNA (e.g. an SCN1A RNA) or a protein encoded by the target RNA in the subject. In some embodiments, the administration may increase the amount of a productive isoform of a target RNA in the subject. In some embodiments, the administration may increase the amount of a productive isoform of a target RNA in the subject relative to a control. In some embodiments, the administration may increase the amount of a productive isoform of target RNA in the subject relative to a baseline amount of said productive isoform. In some embodiments, the method increases an amount of a productive isoform of target RNA in the subject, relative to a control or baseline amount of said productive isoform.

[0227] In some embodiments, the administration may increase the amount of a protein encoded by a target RNA (e.g. a NaV1.1 channel or protein encoded by an SCN1A RNA) in the subject. In some embodiments, the administration may increase the amount of a protein encoded by a target RNA in the subject relative to a control. In some embodiments, the administration may increase the amount of a protein encoded by a target RNA in the subject relative to a baseline amount of the protein encoded by the target RNA. In some embodiments, the administration increases an amount of a protein encoded by a target RNA in the subject, relative to a control or baseline amount of the protein encoded by the target RNA.

[0228] In some embodiments, the administration improves an aspect in the subject. In some embodiments, the administration improves a symptom of the disorder. In some embodiments, the administration improves the symptom relative to a control. In some embodiments, the administration improves the symptom relative to a baseline amount of the symptom. In some embodiments, the administration improves the symptom, relative to a control or baseline amount.

[0229] In some embodiments, the administration improves sodium transport in the subject. In some embodiments, the administration may improve sodium transport in the subject relative to a control. In some embodiments, the administration may improve sodium transport in the subject relative to a baseline amount of sodium transport. In some embodiments, the administration improves sodium transport in the subject, relative to a control or baseline amount.

[0230] The method or administration may improve a survival chance of a subject, for example as shown in FIG. 18 or FIG. 19. The method may reduce a number of seizures, seizure frequency, or seizure duration as provided herein.

### Treating Epilepsy

[0231] Described herein, in some embodiments, is a method for treating epilepsy in a subject in need thereof. Described herein, in some embodiments, is a method for preventing epilepsy in a subject in need thereof. In some embodiments, the method comprises administering a therapeutically effective amount of a synthetic composition that may silence splicing of an alternatively spliced region of a ribonucleic acid (RNA). In some embodiments, the method comprises administering a therapeutically effective amount of a synthetic composition that may reduce splicing of an alternatively spliced region of RNA. In some embodiments, the method comprises administering a therapeutically effective amount of a synthetic composition that may silence splicing of an alternatively spliced region of RNA encoding SCN1A. In some embodiments, the method comprises administering a therapeutically effective amount of a synthetic composition that may reduce splicing of an alternatively spliced region of RNA encoding sodium channel protein type 1 subunit alpha (SCN1A). Described herein, in some embodiments, is a method of treating or preventing epilepsy in a subject in need thereof, comprised of administering a therapeutically effective amount of a synthetic composition that silences or reduces splicing of an alternatively spliced region of a ribonucleic acid (RNA) encoding sodium channel protein type 1 subunit alpha (SCN1A). In some embodiments, the alternatively spliced region may include an exon. In some embodiments, the alternatively spliced region may include exon 20N of the RNA.

[0232] In some embodiments, the subject is in need of treatment for an epileptic disorder. In some embodiments, the subject is in need of treatment for a genetic disorder such as Dravet syndrome.

[0233] In some embodiments, the administration may increase the amount of a productive isoform of SCN1A in the subject. In some embodiments, the administration may increase the amount of a productive isoform of SCN1A in the subject relative to a control. In some embodiments, the administration may increase the amount of a productive isoform of SCN1A in the subject relative to a baseline amount of said productive isoform. In some embodiments, the method increases an amount of a productive isoform of SCN1A in the subject, relative to a control or baseline amount of said productive isoform.

[0234] In some embodiments, the administration may increase the amount of a NaV1.1 channel or protein (e.g. SCN1A protein) in the subject. In some embodiments, the administration may increase the amount of a NaV1.1 channel or protein (e.g. SCN1A protein) in the subject relative to a control. In some embodiments, the administration may increase the amount of a NaV1.1 channel or protein (e.g. SCN1A protein) in the subject relative to a baseline amount of the NaV1.1 channel or protein. In some embodiments, the administration increases an amount of a NaV1.1 channel or protein (e.g. SCN1A protein) in the subject, relative to a control or baseline amount of the NaV1.1 channel or protein.

[0235] In some embodiments, the administration improves an aspect in the subject. In some embodiments, the administration improves a symptom of the disorder. In some embodiments, the administration improves the symptom relative to a control. In some embodiments, the administration improves the symptom relative to a baseline amount of the symptom. In some embodiments, the administration improves the symptom, relative to a control or baseline amount.

[0236] In some embodiments, the administration may improve sodium transport in the subject. In some embodiments, the administration may improve sodium transport in the subject relative to a control. In some embodiments, the administration may improve sodium transport in the subject relative to a baseline amount of sodium transport. In some embodiments, the administration improves sodium transport in the subject, relative to a control or baseline amount.

[0237] In some embodiments, the administration prevents the subject from having seizures. In some embodiments, the administration reduces the amount of the seizures of the subject relative to a baseline amount. In some embodiments, the administration reduces the severity of the seizures of the subject relative to a baseline severity. In some embodiments, the administration prevents the subject from having seizures, or reduces an amount or severity of the seizures of the subject relative to a baseline amount or severity.

### Treating a Genetic Disorder

[0238] Described herein, in some embodiments, is a method for treating a genetic disorder such as Dravet syndrome in a subject in need thereof. In some embodiments, the method may prevent a manifestation of a genetic disorder such as Dravet syndrome in a subject in need thereof. In some embodiments, the method comprises administering a therapeutically effective amount of a synthetic composition that may silence splicing of an alternatively spliced region of a target RNA (e.g. an RNA encoding SCN1A). In some embodiments, the method comprises administering a therapeutically effective amount of a synthetic composition that may reduce splicing of an alternatively spliced region of a target RNA (e.g. an RNA encoding SCN1A). Described herein, in some embodiments, is a method of treating a genetic disorder such as Dravet syndrome in a subject in need thereof, comprised of administering a therapeutically effective amount of a synthetic composition that silences or reduces splicing of an alternatively spliced region of a target RNA (e.g. an RNA encoding SCN1A). In some embodiments, the alternatively spliced region comprises a nonsense-mediated decay (NMD) exon of the target RNA (e.g. exon 20N of an SCN1A RNA), or an equivalent region depending on the subject's species.

[0239] In some embodiments, the administration may increase an amount of a productive isoform of a target RNA (e.g. a SCN1A RNA) in the subject. In some embodiments, the administration may increase an amount of a productive isoform of a target RNA in the subject relative to a control. In some embodiments, the administration may increase an amount of a productive isoform of a target RNA in the subject relative to a baseline amount of said productive isoform. In some embodiments, the administration increases an amount of a productive isoform of a target RNA in the subject, relative to a control or baseline amount of said productive isoform.

[0240] In some embodiments, the administration may increase an amount of a protein encoded by the target RNA (e.g. a NaV1.1 protein encoded by an SCN1A RNA) in the subject. In some embodiments, the administration may increase an amount of a protein encoded by the target RNA in the subject relative to a control amount of the protein encoded by the target RNA. In some embodiments, the administration may increase an amount of a protein encoded by the target RNA in the subject relative to a baseline amount of the protein encoded by the target RNA. In some embodiments, the administration increases an amount of protein encoded by the target RNA in the subject, relative to a control or baseline amount of the protein encoded by the target RNA.

[0241] In some embodiments, the administration improves an aspect in the subject. In some embodiments, the administration improves a symptom of the disorder. In some embodiments, the administration improves the symptom relative to a control. In some embodiments, the administration improves the symptom relative to a baseline amount of the symptom. In some embodiments, the administration improves the symptom, relative to a control or baseline amount.

[0242] In some embodiments, the administration may improve sodium transport in the subject. In some embodiments, the administration may improve sodium transport in the subject relative to a control. In some embodiments, the administration may improve sodium transport in the subject relative to a baseline amount. In some embodiments, the administration improves sodium transport in the subject, relative to a control or baseline amount.

[0243] In some embodiments, the administration may prevent the subject from having seizures. Characteristics of seizures vary and depend on where in the brain the disturbance first starts, and how far it spreads. Temporary symptoms occur, such as loss of awareness or consciousness, and disturbances of movement, sensation (including vision, hearing and taste), mood, or other cognitive functions. Subjects with epilepsy tend to have more physical problems (such as fractures and bruising from injuries related to seizures) as well as higher rates of psychological conditions, including anxiety and depression. The risk of premature death in people with epilepsy is up to three times higher than in the general population. In some embodiments, the administration may reduce the amount of the seizures of the subject relative to a baseline amount. In some embodiments, the administration may reduce the severity of the seizures of the subject relative to a baseline severity. In some embodiments, the administration prevents the subject from having seizures, or reduces an amount or severity of the seizures of the subject relative to a baseline amount or severity.

[0244] A genetic disorder such as Dravet syndrome may include epilepsy. The epilepsy of a subject having the genetic disorder may be treated or improved. The genetic disorder may include seizures. The seizures of a subject having the genetic disorder may be treated or improved. For example, a seizure number, frequency, or duration may be reduced in a subject with the genetic disorder upon treatment.

### Administration

[0245] Disclosed herein, in some embodiments, are methods that include administering a composition. The administration may be to a subject. The administration may be to a human subject. The administered composition may include an engineered snRNA. The administered composition may include an expression vector. The administered composition may include an expression vector encoding an engineered snRNA. The administered composition may include a pharmaceutical composition. The administered composition may include a virus. The administered composition may include a virus comprising an expression vector. The administered composition may include a liposome. The administered composition may include a nanoparticle.

[0246] The administration may be by a route of administration. The administration be systemic. The administration be intravenous. The administration may include an injection.

[0247] The administration may be at a site of administration. The administration may be intracerebroventricular (ICV). The administration may be retroorbital.

### Definitions

[0248] Unless defined otherwise, all terms of art, notations and other technical and scientific terms or terminology used herein are intended to have the same meaning as is commonly understood by one of ordinary skill in the art to which the claimed subject matter pertains. In some cases, terms with commonly understood meanings are defined herein for clarity and/or for ready reference, and the inclusion of such definitions herein should not necessarily be construed to represent a substantial difference over what is generally understood in the art.

[0249] Throughout this application, various embodiments may be presented in a range format. It should be understood that the description in range format is merely for convenience and brevity and should not be construed as an inflexible limitation on the scope of the disclosure. Accordingly, the description of a range should be considered to have specifically disclosed all the possible subranges as well as individual numerical values within that range. For example, description of a range such as from 1 to 6 should be considered to have specifically disclosed subranges such as from 1 to 3, from 1 to 4, from 1 to 5, from 2 to 4, from 2 to 6, from 3 to 6 etc., as well as individual numbers within that range, for example, 1, 2, 3, 4, 5, and 6. This applies regardless of the breadth of the range.

[0250] As used in the specification and claims, the singular forms “a”, “an” and “the” include plural references unless the context clearly dictates otherwise. For example, the term “a sample” includes a plurality of samples, including mixtures thereof.

[0251] As used herein, the term “about” a number refers to that number plus or minus 15% of that number. The term “about” a range refers to that range minus 15% of its lowest value and plus 15% of its greatest value.

[0252] The terms “determining,” “measuring,” “evaluating,” “assessing,” “assaying,” and “analyzing” are often used interchangeably herein to refer to forms of measurement. The terms include determining if an element is present or not (for example, detection). These terms can include quantitative, qualitative or quantitative and qualitative determinations. Assessing can be relative or absolute. “Detecting the presence of” can include determining the amount of something present in addition to determining whether it is present or absent depending on the context.

[0253] Some embodiments relate to a small nuclear RNA (snRNA). An snRNA may include a class of small RNA molecules found within splicing speckles or Cajal bodies of a eukaryotic cell nucleus. A length of an unmodified snRNA may average about 150 nucleotides. An snRNA may be transcribed by RNA polymerase II or RNA polymerase III. An snRNA may function in the processing of pre-messenger RNA (hnRNA) in the nucleus. Any of these aspects may be modified or missing in a modified or engineered snRNA. An snRNA may associate with a protein or set of proteins to form a complex. The complex may be referred to as a small nuclear ribonucleoprotein (snRNP). Some examples of human snRNA components of such complexes may include: U1 spliceosomal RNA, U2 spliceosomal RNA, U4 spliceosomal RNA, U5 spliceosomal RNA, or U6 spliceosomal RNA. An snRNA may have a high uridine content.

[0254] Some embodiments relate to a U7 snRNA. A U7 snRNA may include an RNA molecule and a component of a small nuclear ribonucleoprotein complex (U7 snRNP). The U7 snRNA may affect histone pre-mRNA processing. The U7 snRNA may be modified or engineered. In some embodiments, the modified or engineered U7 snRNA does not affect histone pre-mRNA processing, or has little effect on such. In some embodiments, a U7 snRNA has a 5′ end that binds an HDE (histone downstream element), a conserved purine-rich region, located 15 nucleotides downstream a histone mRNA cleavage site. Any of these aspects may be modified or missing in a modified or engineered U7 snRNA. Binding of an HDE region by a U7 snRNA, through complementary base-pairing, may affect recruitment of cleavage factors during histone pre-mRNA processing.

[0255] The terms “subject,” “individual,” or “patient” are often used interchangeably herein. A “subject” can be a biological entity containing expressed genetic materials. The biological entity can be a plant, animal, or microorganism, including, for example, bacteria, viruses, fungi, and protozoa. The subject can be tissues, cells and their progeny of a biological entity obtained in vivo or cultured in vitro. The subject can be a mammal. The mammal can be a human. The subject may be diagnosed or suspected of being at high risk for a disease. In some cases, the subject is not necessarily diagnosed or suspected of being at high risk for the disease.

[0256] A percent sequence identity may be determined by comparing two optimally aligned sequences over a comparison window, wherein the portion of the polynucleotide or polypeptide sequence in the comparison window may comprise additions or deletions (i.e., gaps) as compared to the reference sequence (which does not comprise additions or deletions) for optimal alignment of the two sequences. The percentage may be calculated by determining the number of positions at which the identical nucleic acid base or amino acid residue occurs in both sequences to yield the number of matched positions, dividing the number of matched positions by the total number of positions in the window of comparison and multiplying the result by 100 to yield the % sequence identity. A sequence identity may include a sequence identity to a reverse complement. In determining a sequence identity, thymine (T) and uracil (U) may be interchangeable. T and U may be interchangeable when describing an oligonucleotide. In some embodiments, Ts and Us are interchangeable depending on whether the oligonucleotide is an RNA or DNA, where RNA includes U and DNA includes T.

[0257] A discrepancy between the written description and a sequence listing submitted herein may be resolved in favor of the written description.

[0258] As used herein, the terms “treatment” or “treating” are used in reference to a pharmaceutical or other intervention regimen for obtaining beneficial or desired results in the recipient. Beneficial or desired results include but are not limited to a therapeutic benefit and/or a prophylactic benefit. A therapeutic benefit may refer to eradication or amelioration of symptoms or of an underlying disorder being treated. Also, a therapeutic benefit can be achieved with the eradication or amelioration of one or more of the physiological symptoms associated with the underlying disorder such that an improvement is observed in the subject, notwithstanding that the subject may still be afflicted with the underlying disorder. A prophylactic effect includes delaying, preventing, or eliminating the appearance of a disease or condition, delaying or eliminating the onset of symptoms of a disease or condition, slowing, halting, or reversing the progression of a disease or condition, or any combination thereof. For prophylactic benefit, a subject at risk of developing a particular disease, or to a subject reporting one or more of the physiological symptoms of a disease may undergo treatment, even though a diagnosis of this disease may not have been made.

[0259] The section headings used herein are for organizational purposes only and are not to be construed as limiting the subject matter described.

### EXAMPLES

[0260] The following examples are included for illustrative purposes only and are not intended to limit the scope of the invention. The data in these examples are indicative of improvements in the compositions and methods described herein over existing compositions and methods.

### Example 1: Screen to Identify U7-Based Splice Modulation Candidates of SCN1A

[0261] The alternatively spliced NMD exon of SEQ ID NO: 2 present in humans (exon 20N) is 96% conserved in mice (62/64 identity) (mouse exon 21N, SEQ ID NO: 1). The region encompassing the NMD exon, excluding 50 bp upstream and downstream, has similar identity (159/164 identity) (FIG. 1) A screen was performed in mouse neuroblast cells (Neuro-2a cell line) with a plasmid library encoding U7 expression cassettes (which included a promoter, ESS, antisense sequence, smOPT, hairpin, and 3′ terminator) designed to target the entire NMD exon and flanking regions. The library consisted of 32 unique U7 targeting sequences of 20, 24, 26, or 30 nucleotides in length. Each targeting sequence was paired with each of three unique exonic splicing silencer (ESS) sequences (Tables 2A-2B3). Neuro-2a cells were then transfected with plasmid DNA and suppression of NMD exon inclusion was analyzed via end point RT-PCR. This method identified 19 U7 targeting sequence/ESS combinations capable of increasing SCN1A isoform expression by 50% or greater (FIG. 2, Table 2C).

TABLE 2A

| Construct | | ESS SEQ | Mouse U7 Targeting | SEQ ID |
|---|---|---|---|---|
| Name | ESS Sequence (5′ to 3′) | ID NO: | Sequence (5′ to 3′) | NO: |
| Scramble- | ATGATAGGGACTTAGGGT | 11 | GCACCCCATCCCCCACTACA | 14 |
| 01 | GA | | | |
| N5-01 | ATGATAGGGACTTAGGGT | 11 | AACCACCGCTCCACCCCATC | 18 |
| | GA | | | |
| N5-02 | ATGATAGGGACTTAGGGT | 11 | CAAGTTGGAGCAAGATTATC | 19 |
| | GA | | | |
| N5-03 | ATGATAGGGACTTAGGGT | 11 | CTATATAAAATAGAAATATA | 20 |
| | GA | | | |
| N5-04 | ATGATAGGGACTTAGGGT | 11 | TAGTTTATTATTAGTTAGAA | 21 |
| | GA | | | |
| N5-05 | ATGATAGGGACTTAGGGT | 11 | GAGGAACCACCGCTCCACCCC | 22 |
| | GA | | ATC | |
| N5-06 | ATGATAGGGACTTAGGGT | 11 | CATCCAAGTTGGAGCAAGATT | 23 |
| | GA | | ATC | |
| N5-07 | ATGATAGGGACTTAGGGT | 11 | TATCCTATATAAAATAGAAAT | 24 |
| | GA | | ATA | |
| N5-08 | ATGATAGGGACTTAGGGT | 11 | TATATAGTTTATTATTAGTTAG | 25 |
| | GA | | AA | |
| N5-09 | ATGATAGGGACTTAGGGT | 11 | GGGAGGAACCACCGCTCCACC | 26 |
| | GA | | CCATC | |
| N5-10 | ATGATAGGGACTTAGGGT | 11 | CCCATCCAAGTTGGAGCAAGA | 27 |
| | GA | | TTATC | |
| N5-11 | ATGATAGGGACTTAGGGT | 11 | ATTATCCTATATAAAATAGAA | 28 |
| | GA | | ATATA | |
| N5-12 | ATGATAGGGACTTAGGGT | 11 | AATATATAGTTTATTATTAGTT | 29 |
| | GA | | AGAA | |
| N5-13 | ATGATAGGGACTTAGGGT | 11 | TGAGGGGAGGAACCACCGCTC | 30 |
| | GA | | CACCCCATC | |
| N5-14 | ATGATAGGGACTTAGGGT | 11 | CCACCCCATCCAAGTTGGAGC | 31 |
| | GA | | AAGATTATC | |
| N5-15 | ATGATAGGGACTTAGGGT | 11 | CAAGATTATCCTATATAAAAT | 32 |
| | GA | | AGAAATATA | |
| N5-16 | ATGATAGGGACTTAGGGT | 11 | TAGAAATATATAGTTTATTATT | 33 |
| | GA | | AGTTAGAA | |
| N3-01 | ATGATAGGGACTTAGGGT | 11 | AGTGCAAGGATTAAAGGTAG | 34 |
| | GA | | | |
| N3-02 | ATGATAGGGACTTAGGGT | 11 | CAAAAGGGGTAATACAGTAC | 35 |
| | GA | | | |
| N3-03 | ATGATAGGGACTTAGGGT | 11 | CCATAATAAAGGGCTGAGGG | 36 |
| | GA | | | |
| N3-04 | ATGATAGGGACTTAGGGT | 11 | GAGGAACCACCGCTCCACCC | 37 |
| | GA | | | |
| N3-05 | ATGATAGGGACTTAGGGT | 11 | TCACAGTGCAAGGATTAAAGG | 38 |
| | GA | | TAG | |
| N3-06 | ATGATAGGGACTTAGGGT | 11 | GTAGCAAAAGGGGTAATACA | 39 |
| | GA | | GTAC | |
| N3-07 | ATGATAGGGACTTAGGGT | 11 | GTACCCATAATAAAGGGCTGA | 40 |
| | GA | | GGG | |
| N3-08 | ATGATAGGGACTTAGGGT | 11 | AGGGGAGGAACCACCGCTCCA | 41 |
| | GA | | CCC | |
| N3-09 | ATGATAGGGACTTAGGGT | 11 | AGTCACAGTGCAAGGATTAAA | 42 |
| | GA | | GGTAG | |
| N3-10 | ATGATAGGGACTTAGGGT | 11 | AGGTAGCAAAAGGGGTAATA | 43 |
| | GA | | CAGTAC | |
| N3-11 | ATGATAGGGACTTAGGGT | 11 | CAGTACCCATAATAAAGGGCT | 44 |
| | GA | | GAGGG | |
| N3-12 | ATGATAGGGACTTAGGGT | 11 | TGAGGGGAGGAACCACCGCTC | 45 |
| | GA | | CACCC | |
| N3-13 | ATGATAGGGACTTAGGGT | 11 | CATAAGTCACAGTGCAAGGAT | 46 |
| | GA | | TAAAGGTAG | |
| N3-14 | ATGATAGGGACTTAGGGT | 11 | TTAAAGGTAGCAAAAGGGGTA | 47 |
| | GA | | ATACAGTAC | |
| N3-15 | ATGATAGGGACTTAGGGT | 11 | AATACAGTACCCATAATAAAG | 48 |
| | GA | | GGCTGAGGG | |
| N3-16 | ATGATAGGGACTTAGGGT | 11 | GGGCTGAGGGGAGGAACCAC | 49 |
| | GA | | CGCTCCACCC | |
| N5- | TTTGTTCCGTGGGTGGTTT | 12 | AACCACCGCTCCACCCCATC | 18 |
| ESSalt1-01 | A | | | |
| N5- | TTTGTTCCGTGGGTGGTTT | 12 | CAAGTTGGAGCAAGATTATC | 19 |
| ESSalt1-02 | A | | | |
| N5- | TTTGTTCCGTGGGTGGTTT | 12 | CTATATAAAATAGAAATATA | 20 |
| ESSalt1-03 | A | | | |
| N5- | TTTGTTCCGTGGGTGGTTT | 12 | TAGTTTATTATTAGTTAGAA | 21 |
| ESSalt1-04 | A | | | |
| N5- | TTTGTTCCGTGGGTGGTTT | 12 | GAGGAACCACCGCTCCACCCC | 22 |
| ESSalt1-05 | A | | ATC | |
| N5- | TTTGTTCCGTGGGTGGTTT | 12 | CATCCAAGTTGGAGCAAGATT | 23 |
| ESSalt1-06 | A | | ATC | |
| N5- | TTTGTTCCGTGGGTGGTTT | 12 | TATCCTATATAAAATAGAAAT | 24 |
| ESSalt1-07 | A | | ATA | |
| N5- | TTTGTTCCGTGGGTGGTTT | 12 | TATATAGTTTATTATTAGTTAG | 25 |
| ESSalt1-08 | A | | AA | |
| N5- | TTTGTTCCGTGGGTGGTTT | 12 | GGGAGGAACCACCGCTCCACC | 26 |
| ESSalt1-09 | A | | CCATC | |
| Scramble- | TTTGTTCCGTGGGTGGTTT | 12 | GGAGAATCACCTTATAGGAT | 15 |
| 02 | A | | | |
| N5- | TTTGTTCCGTGGGTGGTTT | 12 | CCCATCCAAGTTGGAGCAAGA | 27 |
| ESSalt1-10 | A | | TTATC | |
| N5- | TTTGTTCCGTGGGTGGTTT | 12 | ATTATCCTATATAAAATAGAA | 28 |
| ESSalt1-11 | A | | ATATA | |
| N5- | TTTGTTCCGTGGGTGGTTT | 12 | AATATATAGTTTATTATTAGTT | 29 |
| ESSalt1-12 | A | | AGAA | |
| N5- | TTTGTTCCGTGGGTGGTTT | 12 | TGAGGGGAGGAACCACCGCTC | 30 |
| ESSalt1-13 | A | | CACCCCATC | |
| N5- | TTTGTTCCGTGGGTGGTTT | 12 | CCACCCCATCCAAGTTGGAGC | 31 |
| ESSalt1-14 | A | | AAGATTATC | |
| N5- | TTTGTTCCGTGGGTGGTTT | 12 | CAAGATTATCCTATATAAAAT | 32 |
| ESSalt1-15 | A | | AGAAATATA | |
| N5 | TTTGTTCCGTGGGTGGTTT | 12 | TAGAAATATATAGTTTATTATT | 33 |
| ESSalt1-16 | A | | AGTTAGAA | |
| N3- | TTTGTTCCGTGGGTGGTTT | 12 | AGTGCAAGGATTAAAGGTAG | 34 |
| ESSalt1-01 | A | | | |
| N3- | TTTGTTCCGTGGGTGGTTT | 12 | CAAAAGGGGTAATACAGTAC | 35 |
| ESSalt1-02 | A | | | |
| N3- | TTTGTTCCGTGGGTGGTTT | 12 | CCATAATAAAGGGCTGAGGG | 36 |
| ESSalt1-03 | A | | | |
| N3- | TTTGTTCCGTGGGTGGTTT | 12 | GAGGAACCACCGCTCCACCC | 37 |
| ESSalt1-04 | A | | | |
| Scramble- | TTTGTTCCGTGGGTGGTTT | 12 | GAATAATAACATAATAATAT | 16 |
| 03 | A | | | |
| N3- | TTTGTTCCGTGGGTGGTTT | 12 | TCACAGTGCAAGGATTAAAGG | 38 |
| ESSalt1-05 | A | | TAG | |
| N3 | TTTGTTCCGTGGGTGGTTT | 12 | GTAGCAAAAGGGGTAATACA | 39 |
| ESSalt1-06 | A | | GTAC | |
| N3- | TTTGTTCCGTGGGTGGTTT | 12 | GTACCCATAATAAAGGGCTGA | 40 |
| ESSalt1-07 | A | | GGG | |
| N3 | TTTGTTCCGTGGGTGGTTT | 12 | AGGGGAGGAACCACCGCTCCA | 41 |
| ESSalt1-08 | A | | CCC | |
| N3- | TTTGTTCCGTGGGTGGTTT | 12 | AGTCACAGTGCAAGGATTAAA | 42 |
| ESSalt1-09 | A | | GGTAG | |
| N3- | TTTGTTCCGTGGGTGGTTT | 12 | AGGTAGCAAAAGGGGTAATA | 43 |
| ESSalt1-10 | A | | CAGTAC | |
| N3- | TTTGTTCCGTGGGTGGTTT | 12 | CAGTACCCATAATAAAGGGCT | 44 |
| ESSalt1-11 | A | | GAGGG | |
| N3- | TTTGTTCCGTGGGTGGTTT | 12 | TGAGGGGAGGAACCACCGCTC | 45 |
| ESSalt1-12 | A | | CACCC | |
| N3- | TTTGTTCCGTGGGTGGTTT | 12 | CATAAGTCACAGTGCAAGGAT | 46 |
| ESSalt1-13 | A | | TAAAGGTAG | |
| N3- | TTTGTTCCGTGGGTGGTTT | 12 | TTAAAGGTAGCAAAAGGGGTA | 47 |
| ESSalt1-14 | A | | ATACAGTAC | |
| N3- | TTTGTTCCGTGGGTGGTTT | 12 | AATACAGTACCCATAATAAAG | 48 |
| ESSalt1-15 | A | | GGCTGAGGG | |
| N3- | TTTGTTCCGTGGGTGGTTT | 12 | GGGCTGAGGGGAGGAACCAC | 49 |
| ESSalt1-16 | A | | CGCTCCACCC | |
| N5- | TGGGGGGAGGTAGGTAGG | 13 | AACCACCGCTCCACCCCATC | 18 |
| ESSalt2-01 | TA | | | |
| N5- | TGGGGGGAGGTAGGTAGG | 13 | CAAGTTGGAGCAAGATTATC | 19 |
| ESSalt2-02 | TA | | | |
| N5- | TGGGGGGAGGTAGGTAGG | 13 | CTATATAAAATAGAAATATA | 20 |
| ESSalt2-03 | TA | | | |
| N5- | TGGGGGGAGGTAGGTAGG | 13 | TAGTTTATTATTAGTTAGAA | 21 |
| ESSalt2-04 | TA | | | |
| N5- | TGGGGGGAGGTAGGTAGG | 13 | GAGGAACCACCGCTCCACCCC | 22 |
| ESSalt2-05 | TA | | ATC | |
| N5- | TGGGGGGAGGTAGGTAGG | 13 | CATCCAAGTTGGAGCAAGATT | 23 |
| ESSalt2-06 | TA | | ATC | |
| N5- | TGGGGGGAGGTAGGTAGG | 13 | TATCCTATATAAAATAGAAAT | 24 |
| ESSalt2-07 | TA | | ATA | |
| N5- | TGGGGGGAGGTAGGTAGG | 13 | TATATAGTTTATTATTAGTTAG | 25 |
| ESSalt2-08 | TA | | AA | |
| N5- | TGGGGGGAGGTAGGTAGG | 13 | GGGAGGAACCACCGCTCCACC | 26 |
| ESSalt2-09 | TA | | CCATC | |
| N5- | TGGGGGGAGGTAGGTAGG | 13 | CCCATCCAAGTTGGAGCAAGA | 27 |
| ESSalt2-10 | TA | | TTATC | |
| N5- | TGGGGGGAGGTAGGTAGG | 13 | ATTATCCTATATAAAATAGAA | 28 |
| ESSalt2-11 | TA | | ATATA | |
| N5- | TGGGGGGAGGTAGGTAGG | 13 | TGAGGGGAGGAACCACCGCTC | 30 |
| ESSalt2-13 | TA | | CACCCCATC | |
| N5- | TGGGGGGAGGTAGGTAGG | 13 | CCACCCCATCCAAGTTGGAGC | 31 |
| ESSalt2-14 | TA | | AAGATTATC | |
| N5- | TGGGGGGAGGTAGGTAGG | 13 | CAAGATTATCCTATATAAAAT | 32 |
| ESSalt2-15 | TA | | AGAAATATA | |
| N3- | TGGGGGGAGGTAGGTAGG | 13 | AGTGCAAGGATTAAAGGTAG | 34 |
| ESSalt2-01 | TA | | | |
| N3- | TGGGGGGAGGTAGGTAGG | 13 | CAAAAGGGGTAATACAGTAC | 35 |
| ESSalt2-02 | TA | | | |
| N3- | TGGGGGGAGGTAGGTAGG | 13 | CCATAATAAAGGGCTGAGGG | 36 |
| ESSalt2-03 | TA | | | |
| N3- | TGGGGGGAGGTAGGTAGG | 13 | GAGGAACCACCGCTCCACCC | 37 |
| ESSalt2-04 | TA | | | |
| N3- | TGGGGGGAGGTAGGTAGG | 13 | TCACAGTGCAAGGATTAAAGG | 38 |
| ESSalt2-05 | TA | | TAG | |
| N3- | TGGGGGGAGGTAGGTAGG | 13 | GTAGCAAAAGGGGTAATACA | 39 |
| ESSalt2-06 | TA | | GTAC | |
| N3- | TGGGGGGAGGTAGGTAGG | 13 | GTACCCATAATAAAGGGCTGA | 40 |
| ESSalt2-07 | TA | | GGG | |
| N3- | TGGGGGGAGGTAGGTAGG | 13 | AGGGGAGGAACCACCGCTCCA | 41 |
| ESSalt2-08 | TA | | CCC | |
| N3- | TGGGGGGAGGTAGGTAGG | 13 | AGTCACAGTGCAAGGATTAAA | 42 |
| ESSalt2-09 | TA | | GGTAG | |
| N3- | TGGGGGGAGGTAGGTAGG | 13 | AGGTAGCAAAAGGGGTAATA | 43 |
| ESSalt2-10 | TA | | CAGTAC | |
| N3- | TGGGGGGAGGTAGGTAGG | 13 | CAGTACCCATAATAAAGGGCT | 44 |
| ESSalt2-11 | TA | | GAGGG | |
| N3- | TGGGGGGAGGTAGGTAGG | 13 | CATAAGTCACAGTGCAAGGAT | 46 |
| ESSalt2-13 | TA | | TAAAGGTAG | |
| N3- | TGGGGGGAGGTAGGTAGG | 13 | TTAAAGGTAGCAAAAGGGGTA | 47 |
| ESSalt2-14 | TA | | ATACAGTAC | |
| N3- | TGGGGGGAGGTAGGTAGG | 13 | AATACAGTACCCATAATAAAG | 48 |
| ESSalt2-15 | TA | | GGCTGAGGG | |
| Scramble- | TGGGGGGAGGTAGGTAGG | 13 | GAAATTTATGTATTGATTAT | 17 |
| 04 | TA | | | |

TABLE 2B

| Construct | Humanized U7 Targeting | SEQ ID | % Identity to |
|---|---|---|---|
| Name | Sequence (5′ to 3′) | NO: | Mouse Sequence |
| N5-01 | AACCAGCGCTCCACCCCATC | 151 | 95.0 |
| N5-02 | CAAGTTGGAGCAAGATTATC | 19 | 100.0 |
| N5-03 | CTATACAAAATAGAAATATA | 50 | 95.0 |
| N5-04 | TAGTTTGTTATTAGTTAGAA | 51 | 95.0 |
| N5-05 | GAGGAACCAGCGCTCCACCCCATC | 52 | 95.8 |
| N5-06 | CATCCAAGTTGGAGCAAGATTATC | 23 | 100.0 |
| N5-07 | TATCCTATACAAAATAGAAATATA | 53 | 95.8 |
| N5-08 | TATATAGTTTGTTATTAGTTAGAA | 54 | 95.8 |
| N5-09 | GGGAGGAACCAGCGCTCCACCCCATC | 55 | 96.2 |
| N5-10 | CCCATCCAAGTTGGAGCAAGATTATC | 27 | 100.0 |
| N5-11 | ATTATCCTATACAAAATAGAAATATA | 56 | 96.2 |
| N5-12 | AATATATAGTTTGTTATTAGTTAGAA | 57 | 96.2 |
| N5-13 | TCAGGGGAGGAACCAGCGCTCCACCCCATC | 58 | 93.3 |
| N5-14 | CCACCCCATCCAAGTTGGAGCAAGATTATC | 31 | 100.0 |
| N5-15 | CAAGATTATCCTATACAAAATAGAAATATA | 59 | 96.7 |
| N5-16 | TAGAAATATATAGTTTGTTATTAGTTAGAA | 60 | 96.7 |
| N3-01 | AGTGCAAGGATTAAAGGTAG | 34 | 100.0 |
| N3-02 | CAAAAGGGGTAATACAGTAC | 35 | 100.0 |
| N3-03 | CCATAATAAAGGGCTCAGGG | 61 | 95.0 |
| N3-04 | GAGGAACCAGCGCTCCACCC | 62 | 95.0 |
| N3-05 | TCACAGTGCAAGGATTAAAGGTAG | 38 | 100.0 |
| N3-06 | GTAGCAAAAGGGGTAATACAGTAC | 39 | 100.0 |
| N3-07 | GTACCCATAATAAAGGGCTCAGGG | 63 | 95.8 |
| N3-08 | AGGGGAGGAACCAGCGCTCCACCC | 64 | 95.8 |
| N3-09 | AGTCACAGTGCAAGGATTAAAGGTAG | 42 | 100.0 |
| N3-10 | AGGTAGCAAAAGGGGTAATACAGTAC | 43 | 100.0 |
| N3-11 | CAGTACCCATAATAAAGGGCTCAGGG | 65 | 96.2 |
| N3-12 | TCAGGGGAGGAACCAGCGCTCCACCC | 66 | 92.3 |
| N3-13 | CATAAGTCACAGTGCAAGGATTAAAGGTAG | 46 | 100.0 |
| N3-14 | TTAAAGGTAGCAAAAGGGGTAATACAGTAC | 47 | 100.0 |
| N3-15 | AATACAGTACCCATAATAAAGGGCTCAGGG | 67 | 96.7 |
| N3-16 | GGGCTCAGGGGAGGAACCAGCGCTCCACCC | 68 | 93.3 |
| N5-ESSalt1-01 | AACCAGCGCTCCACCCCATC | 69 | 95.0 |
| N5-ESSalt1-02 | CAAGTTGGAGCAAGATTATC | 19 | 100.0 |
| N5-ESSalt1-03 | CTATACAAAATAGAAATATA | 70 | 95.0 |
| N5-ESSalt1-04 | TAGTTTGTTATTAGTTAGAA | 71 | 95.0 |
| N5-ESSalt1-05 | GAGGAACCAGCGCTCCACCCCATC | 72 | 95.8 |
| N5-ESSalt1-06 | CATCCAAGTTGGAGCAAGATTATC | 23 | 100.0 |
| N5-ESSalt1-07 | TATCCTATACAAAATAGAAATATA | 73 | 95.8 |
| N5-ESSalt1-08 | TATATAGTTTGTTATTAGTTAGAA | 74 | 95.8 |
| N5-ESSalt1-09 | GGGAGGAACCAGCGCTCCACCCCATC | 75 | 96.2 |
| N5-ESSalt1-10 | CCCATCCAAGTTGGAGCAAGATTATC | 27 | 100.0 |
| N5-ESSalt1-11 | ATTATCCTATACAAAATAGAAATATA | 76 | 96.2 |
| N5-ESSalt1-12 | AATATATAGTTTGTTATTAGTTAGAA | 77 | 96.2 |
| N5-ESSalt1-13 | TCAGGGGAGGAACCAGCGCTCCACCCCATC | 78 | 93.3 |
| N5-ESSalt1-14 | CCACCCCATCCAAGTTGGAGCAAGATTATC | 31 | 100.0 |
| N5-ESSalt1-15 | CAAGATTATCCTATACAAAATAGAAATATA | 79 | 96.7 |
| N5-ESSalt1-16 | TAGAAATATATAGTTTGTTATTAGTTAGAA | 80 | 96.7 |
| N3-ESSalt1-01 | AGTGCAAGGATTAAAGGTAG | 34 | 100.0 |
| N3-ESSalt1-02 | CAAAAGGGGTAATACAGTAC | 35 | 100.0 |
| N3-ESSalt1-03 | CCATAATAAAGGGCTCAGGG | 81 | 95.0 |
| N3-ESSalt1-04 | GAGGAACCAGCGCTCCACCC | 82 | 95.0 |
| N3-ESSalt1-05 | TCACAGTGCAAGGATTAAAGGTAG | 38 | 100.0 |
| N3-ESSalt1-06 | GTAGCAAAAGGGGTAATACAGTAC | 39 | 100.0 |
| N3-ESSalt1-07 | GTACCCATAATAAAGGGCTCAGGG | 83 | 95.8 |
| N3-ESSalt1-08 | AGGGGAGGAACCAGCGCTCCACCC | 84 | 95.8 |
| N3-ESSalt1-09 | AGTCACAGTGCAAGGATTAAAGGTAG | 42 | 100.0 |
| N3-ESSalt1-10 | AGGTAGCAAAAGGGGTAATACAGTAC | 43 | 100.0 |
| N3-ESSalt1-11 | CAGTACCCATAATAAAGGGCTCAGGG | 85 | 96.2 |
| N3-ESSalt1-12 | TCAGGGGAGGAACCAGCGCTCCACCC | 86 | 92.3 |
| N3-ESSalt1-13 | CATAAGTCACAGTGCAAGGATTAAAGGTAG | 46 | 100.0 |
| N3-ESSalt1-14 | TTAAAGGTAGCAAAAGGGGTAATACAGTAC | 47 | 100.0 |
| N3-ESSalt1-15 | AATACAGTACCCATAATAAAGGGCTCAGGG | 87 | 96.7 |
| N3-ESSalt1-16 | GGGCTCAGGGGAGGAACCAGCGCTCCACCC | 88 | 93.3 |
| N5-ESSalt2-01 | AACCAGCGCTCCACCCCATC | 89 | 95.0 |
| N5-ESSalt2-02 | CAAGTTGGAGCAAGATTATC | 19 | 100.0 |
| N5-ESSalt2-03 | CTATACAAAATAGAAATATA | 90 | 95.0 |
| N5-ESSalt2-04 | TAGTTTGTTATTAGTTAGAA | 91 | 95.0 |
| N5-ESSalt2-05 | GAGGAACCAGCGCTCCACCCCATC | 92 | 95.8 |
| N5-ESSalt2-06 | CATCCAAGTTGGAGCAAGATTATC | 23 | 100.0 |
| N5-ESSalt2-07 | TATCCTATACAAAATAGAAATATA | 93 | 95.8 |
| N5-ESSalt2-08 | TATATAGTTTGTTATTAGTTAGAA | 94 | 95.8 |
| N5-ESSalt2-09 | GGGAGGAACCAGCGCTCCACCCCATC | 95 | 96.2 |
| N5-ESSalt2-10 | CCCATCCAAGTTGGAGCAAGATTATC | 27 | 100.0 |
| N5-ESSalt2-11 | ATTATCCTATACAAAATAGAAATATA | 96 | 96.2 |
| N5-ESSalt2-13 | TCAGGGGAGGAACCAGCGCTCCACCCCATC | 97 | 93.3 |
| N5-ESSalt2-14 | CCACCCCATCCAAGTTGGAGCAAGATTATC | 31 | 100.0 |
| N5-ESSalt2-15 | CAAGATTATCCTATACAAAATAGAAATATA | 98 | 96.7 |
| N3-ESSalt2-01 | AGTGCAAGGATTAAAGGTAG | 34 | 100.0 |
| N3-ESSalt2-02 | CAAAAGGGGTAATACAGTAC | 35 | 100.0 |
| N3-ESSalt2-03 | CCATAATAAAGGGCTCAGGG | 99 | 95.0 |
| N3-ESSalt2-04 | GAGGAACCAGCGCTCCACCC | 100 | 95.0 |
| N3-ESSalt2-05 | TCACAGTGCAAGGATTAAAGGTAG | 38 | 100.0 |
| N3-ESSalt2-06 | GTAGCAAAAGGGGTAATACAGTAC | 39 | 100.0 |
| N3-ESSalt2-07 | GTACCCATAATAAAGGGCTCAGGG | 101 | 95.8 |
| N3-ESSalt2-08 | AGGGGAGGAACCAGCGCTCCACCC | 102 | 95.8 |
| N3-ESSalt2-09 | AGTCACAGTGCAAGGATTAAAGGTAG | 42 | 100.0 |
| N3-ESSalt2-10 | AGGTAGCAAAAGGGGTAATACAGTAC | 43 | 100.0 |
| N3-ESSalt2-11 | CAGTACCCATAATAAAGGGCTCAGGG | 103 | 96.2 |
| N3-ESSalt2-13 | CATAAGTCACAGTGCAAGGATTAAAGGTAG | 46 | 100.0 |
| N3-ESSalt2-14 | TTAAAGGTAGCAAAAGGGGTAATACAGTAC | 47 | 100.0 |
| N3-ESSalt2-15 | AATACAGTACCCATAATAAAGGGCTCAGGG | 104 | 96.7 |

TABLE 2C

| Construct Name | Relative Productive Transcript (Mouse, N2a cells) |
|---|---|
| N5-ESSalt2-15 | 1.73 |
| N5-ESSalt2-02 | 1.67 |
| N5-02 | 1.65 |
| N3-13 | 1.63 |
| N3-16 | 1.62 |
| N5-10 | 1.60 |
| N3-07 | 1.58 |
| N5-06 | 1.58 |
| N5-01 | 1.56 |
| N5-04 | 1.56 |
| N5-ESSalt2-14 | 1.56 |
| N3-09 | 1.54 |
| N3-ESSalt2-01 | 1.52 |
| N5-08 | 1.52 |
| N5-ESSalt2-04 | 1.52 |
| N3-10 | 1.50 |
| N5-09 | 1.50 |
| N5-11 | 1.50 |
| N5-15 | 1.50 |
| N5-07 | 1.48 |
| N5-ESSalt1-12 | 1.48 |
| N3-05 | 1.46 |
| N3-ESSalt1-13 | 1.46 |
| N3-ESSalt2-13 | 1.46 |
| N5-03 | 1.46 |
| N5-05 | 1.46 |
| N5-12 | 1.46 |
| N5-14 | 1.46 |
| N3-01 | 1.45 |
| N5-ESSalt1-15 | 1.45 |
| N3-14 | 1.43 |
| N3-ESSalt2-05 | 1.43 |
| N5-13 | 1.43 |
| N5-ESSalt1-13 | 1.43 |
| N3-02 | 1.41 |
| N3-ESSalt1-01 | 1.41 |
| N3-ESSalt1-06 | 1.39 |
| N5-16 | 1.39 |
| N5-ESSalt1-01 | 1.39 |
| N5-ESSalt1-05 | 1.39 |
| N3-04 | 1.37 |
| N3-12 | 1.37 |
| N3-ESSalt1-02 | 1.37 |
| N3-ESSalt1-09 | 1.37 |
| N3-ESSalt2-09 | 1.37 |
| N3-06 | 1.35 |
| N3-ESSalt1-10 | 1.35 |
| N5-ESSalt1-02 | 1.35 |
| N5-ESSalt2-11 | 1.35 |
| N3-08 | 1.33 |
| N3-11 | 1.33 |
| N3-ESSalt2-14 | 1.33 |
| N5-ESSalt1-04 | 1.33 |
| N3-03 | 1.31 |
| N3-ESSalt1-05 | 1.31 |
| N3-ESSalt1-14 | 1.31 |
| N3-ESSalt2-02 | 1.31 |
| N5-ESSalt1-14 | 1.31 |
| N5-ESSalt2-06 | 1.31 |
| N5-ESSalt2-10 | 1.31 |
| N5-ESSalt1-08 | 1.30 |
| N5-ESSalt1-09 | 1.30 |
| N5-ESSalt2-07 | 1.30 |
| N3-ESSalt1-16 | 1.28 |
| N3-ESSalt2-06 | 1.28 |
| N3-ESSalt2-15 | 1.28 |
| N5-ESSalt1-11 | 1.28 |
| N3-15 | 1.26 |
| N3-ESSalt1-11 | 1.24 |
| N5-ESSalt2-03 | 1.24 |
| N3-ESSalt1-15 | 1.22 |
| N3-ESSalt2-04 | 1.22 |
| N5-ESSalt1-10 | 1.22 |
| N5-ESSalt1-07 | 1.20 |
| N5-ESSalt1-16 | 1.20 |
| N5-ESSalt2-13 | 1.20 |
| N3-ESSalt2-03 | 1.18 |
| N3-ESSalt2-10 | 1.16 |
| N5-ESSalt1-06 | 1.16 |
| N3-ESSalt1-08 | 1.15 |
| N3-ESSalt2-11 | 1.15 |
| Scramble-01 | 1.15 |
| N3-ESSalt1-07 | 1.11 |
| N5-ESSalt2-08 | 1.11 |
| N3-ESSalt1-03 | 1.09 |
| N3-ESSalt1-04 | 1.09 |
| N3-ESSalt1-12 | 1.09 |
| N5-ESSalt2-05 | 1.09 |
| N5-ESSalt2-01 | 1.07 |
| N3-ESSalt2-07 | 1.05 |
| N5-ESSalt1-03 | 1.05 |
| Scramble-04 | 1.03 |
| Scramble-02 | 0.98 |
| N3-ESSalt2-08 | 0.90 |
| N5-ESSalt2-09 | 0.90 |
| Scramble-03 | 0.85 |

### Example 2: U7 Constructs with 5′ Targeting Sequence Directly Fused to 3′ Targeting Sequence

[0262] A second U7-based method for suppression of Scn1A NMD transcript was tested. A previous study reported decreased inclusion of an alternative exon using U7 vectors with targeting sequences composed of a 5′-targeting sequence directly fused to a 3′ targeting sequence. 15 different U7 constructs were engineered with different combinations of fused 5′/3′ targeting sequences of varied lengths where targeted sequences were either exonic, intronic, or centered upon the intron/exon junction (Tables 3A-3B). The constructs were tested for their abilities to suppress NMD transcript inclusion in Neuro-2a cells as in Example 1. NMD transcript suppression was observed in 5 out of 15 constructs tested, but none of the sequences suppressed NMD transcript levels by 50% (FIG. 3, Table 3C). Thus although, the different combinations of fused 5′/3′ targeting sequences did suppress NMD transcript levels, they all showed inferior efficacy to the hits identified in the original screen described in Example 1.

TABLE 3A

| Construct | 5′ Targeting Sequence | SEQ ID | 3′ Targeting Sequence | SEQ ID |
|---|---|---|---|---|
| Name | (5′ to 3′) | NO: | (5′ to 3′) | NO: |
| Control | N/A | | N/A | |
| Scramble | GCACCCCATCCCCCACTACA | 14 | N/A | |
| 3c5c-24 | GTAATACAGTACCCATAATA | 105 | AGCAAGATTATCCTATATAAAAT | 120 |
| | AAGG | | A | |
| 3c5c-28 | GGGTAATACAGTACCCATAA | 106 | GGAGCAAGATTATCCTATATAAA | 121 |
| | TAAAGGGC | | ATAGA | |
| 3c5c-30 | GGGGTAATACAGTACCCATA | 107 | TGGAGCAAGATTATCCTATATAA | 122 |
| | ATAAAGGGCT | | AATAGAA | |
| 3ex5ex-24 | AGGGGTAATACAGTACCCAT | 108 | AGATTATCCTATATAAAATAGAA | 123 |
| | AATA | | A | |
| 3ex5ex-28 | AAAAGGGGTAATACAGTACC | 109 | AAGATTATCCTATATAAAATAGA | 124 |
| | CATAATAA | | AATAT | |
| 3ex5ex-30 | CAAAAGGGGTAATACAGTAC | 110 | CAAGATTATCCTATATAAAATAG | 125 |
| | CCATAATAAA | | AAATATA | |
| 3ex5int-24 | TACAGTACCCATAATAAAGG | 111 | TTGGAGCAAGATTATCCTATATA | 126 |
| | GCTG | | A | |
| 3ex5int-28 | ATACAGTACCCATAATAAAG | 112 | AAGTTGGAGCAAGATTATCCTAT | 127 |
| | GGCTGAGG | | ATAAA | |
| 3ex5int30 | AATACAGTACCCATAATAAA | 113 | CAAGTTGGAGCAAGATTATCCTA | 128 |
| | GGGCTGAGGG | | TATAAAA | |
| 3int5ex-24 | AGGGGTAATACAGTACCCAT | 114 | TTGGAGCAAGATTATCCTATATA | 129 |
| | AATA | | A | |
| 3int5ex-28 | AAAAGGGGTAATACAGTACC | 115 | AAGTTGGAGCAAGATTATCCTAT | 130 |
| | CATAATAA | | ATAAA | |
| 3int5ex-30 | CAAAAGGGGTAATACAGTAC | 116 | CAAGTTGGAGCAAGATTATCCTA | 131 |
| | CCATAATAAA | | TATAAAA | |
| 3int5int-24 | TACAGTACCCATAATAAAGG | 117 | AGATTATCCTATATAAAATAGAA | 132 |
| | GCTG | | A | |
| 3int5int-28 | ATACAGTACCCATAATAAAG | 118 | AAGATTATCCTATATAAAATAGA | 133 |
| | GGCTGAGG | | AATAT | |
| 3int5int30 | AATACAGTACCCATAATAAA | 119 | CAAGATTATCCTATATAAAATAG | 134 |
| | GGGCTGAGGG | | AAATATA | |

TABLE 3B

| Construct | | SEQ ID |
|---|---|---|
| Name | Full Targeting Sequence (5′ to 3′) | NO: |
| Control | N/A | |
| Scramble | GCACCCCATCCCCCACTACA | 14 |
| 3c5c-24 | GTAATACAGTACCCATAATAAAGGAGCAAGATTATCCTATATAAAATA | 135 |
| 3c5c-28 | GGGTAATACAGTACCCATAATAAAGGGCGGAGCAAGATTATCCTATATA | 136 |
| | AAATAGA | |
| 3c5c-30 | GGGGTAATACAGTACCCATAATAAAGGGCTTGGAGCAAGATTATCCTAT | 137 |
| | ATAAAATAGAA | |
| 3ex5ex-24 | AGGGGTAATACAGTACCCATAATAAGATTATCCTATATAAAATAGAAA | 138 |
| 3ex5ex-28 | AAAAGGGGTAATACAGTACCCATAATAAAAGATTATCCTATATAAAATA | 139 |
| | GAAATAT | |
| 3ex5ex-30 | CAAAAGGGGTAATACAGTACCCATAATAAACAAGATTATCCTATATAAA | 140 |
| | ATAGAAATATA | |
| 3ex5int-24 | TACAGTACCCATAATAAAGGGCTGTTGGAGCAAGATTATCCTATATAA | 141 |
| 3ex5int-28 | ATACAGTACCCATAATAAAGGGCTGAGGAAGTTGGAGCAAGATTATCCT | 142 |
| | ATATAAA | |
| 3ex5int30 | AATACAGTACCCATAATAAAGGGCTGAGGGCAAGTTGGAGCAAGATTAT | 143 |
| | CCTATATAAAA | |
| 3int5ex-24 | AGGGGTAATACAGTACCCATAATATTGGAGCAAGATTATCCTATATAA | 144 |
| 3int5ex-28 | AAAAGGGGTAATACAGTACCCATAATAAAAGTTGGAGCAAGATTATCCT | 145 |
| | ATATAAA | |
| 3int5ex-30 | CAAAAGGGGTAATACAGTACCCATAATAAACAAGTTGGAGCAAGATTAT | 146 |
| | CCTATATAAAA | |
| 3int5int-24 | TACAGTACCCATAATAAAGGGCTGAGATTATCCTATATAAAATAGAAA | 147 |
| 3int5int-28 | ATACAGTACCCATAATAAAGGGCTGAGGAAGATTATCCTATATAAAATA | 148 |
| | GAAATAT | |
| 3int5int30 | AATACAGTACCCATAATAAAGGGCTGAGGGCAAGATTATCCTATATAAA | 149 |
| | ATAGAAATATA | |

TABLE 3C

| Construct Name | Relative NMD Transcript Level |
|---|---|
| Control | 1 |
| Scramble | 0.9708 |
| 3c5c-24 | 1.0047 |
| 3c5c-28 | 0.7382 |
| 3c5c-30 | 1.0385 |
| 3ex5ex-24 | 1.0328 |
| 3ex5ex-28 | 0.5406 |
| 3ex5ex-30 | 0.751 |
| 3ex5int-24 | 1.0319 |
| 3ex5int-28 | 0.6416 |
| 3ex5int30 | 1.0099 |
| 3int5ex-24 | 1.0866 |
| 3int5ex-28 | 0.967 |
| 3int5ex-30 | 0.6057 |
| 3int5int-24 | 1.0128 |
| 3int5int-28 | 0.967 |
| 3int5int30 | 0.9856 |

### Example 3 Optimization of 5′ and 3′ U7 Pairs

[0263] Previous work has also shown improved modulation of splicing using pairs of U7 constructs targeting the 5′ and 3′ end of a target exon. The U7 screen described in example 1 identified a cluster of high-efficacy target sequences at the 5′ end of mouse exon 21N. The top 5 5′ target sequences were paired with the top 3′ target sequence (Tables 4A-41B). The paired constructs were then compared against single-U7 constructs for each targeting sequence. Evaluation of NMD transcript levels in Neuro-2a cells, as performed in Example 1, showed that the combination of two U7 constructs targeting the 5′ and 3′ ends of the target exon partially inhibited NMD suppression when compared to the 5′- and 3′-targeting sequences alone (FIG. 4, Table 4C). This example shows that the pairing of constructs targeting the 5′ and 3′ end of a target exon is worse at NMD transcript suppression than a single construct.

TABLE 4A

| | 5′ Targeted Sequence | | | |
|---|---|---|---|---|
| Construct | | SEQ ID | Targeting Sequence | SEQ ID |
| Name | ESS (5′ to 3′) | NO: | (5′ to 3′) | NO: |
| N5- | TGGGGGGAGGTAGGTAGGT | 13 | CAAGATTATCCTATATAAA | 32 |
| ESSalt2- | A | | ATAGAAATATA | |
| 15 | | | | |
| N5- | TGGGGGGAGGTAGGTAGGT | 13 | CAAGTTGGAGCAAGATTAT | 19 |
| ESSalt2- | A | | C | |
| 02 | | | | |
| N5-02 | ATGATAGGGACTTAGGGTG | 11 | CAAGTTGGAGCAAGATTAT | 19 |
| | A | | C | |
| N5-10 | ATGATAGGGACTTAGGGTG | 11 | CCCATCCAAGTTGGAGCAA | 27 |
| | A | | GATTATC | |
| N5-06 | ATGATAGGGACTTAGGGTG | 11 | CATCCAAGTTGGAGCAAGA | 23 |
| | A | | TTATC | |
| N3-13 + | TGGGGGGAGGTAGGTAGGT | 13 | CAAGATTATCCTATATAAA | 32 |
| N5- | A | | ATAGAAATATA | |
| ESSal2-15 | | | | |
| N3-13 + | TGGGGGGAGGTAGGTAGGT | 13 | CAAGTTGGAGCAAGATTAT | 19 |
| N5- | A | | C | |
| ESSalt2- | | | | |
| 02 | | | | |
| N3-13 + | ATGATAGGGACTTAGGGTG | 11 | CAAGTTGGAGCAAGATTAT | 19 |
| N5-02 | A | | C | |
| N3-13 + | ATGATAGGGACTTAGGGTG | 11 | CCCATCCAAGTTGGAGCAA | 27 |
| N5-10 | A | | GATTATC | |
| N3-13 + | ATGATAGGGACTTAGGGTG | 11 | CATCCAAGTTGGAGCAAGA | 23 |
| N5-06 | A | | TTATC | |

TABLE 4B

| | 3′ Targeted Sequence | | | |
|---|---|---|---|---|
| Construct | | SEQ ID | Targeting Sequence | SEQ ID |
| Name | ESS (5′ to 3′) | NO: | (5′ to 3′) | NO: |
| N5-ESSalt2-15 | N/A | N/A | N/A | N/A |
| N5-ESSalt2-02 | N/A | N/A | N/A | N/A |
| N5-02 | N/A | N/A | N/A | N/A |
| N5-10 | N/A | N/A | N/A | N/A |
| N5-06 | N/A | N/A | N/A | N/A |
| N3-13 + N5- | ATGATAGGGACTTAGGGTGA | 11 | CATAAGTCACAGTGCAAGG | 46 |
| ESSal2-15 | | | ATTAAAGGTAG | |
| N3-13 + N5- | ATGATAGGGACTTAGGGTGA | 11 | CATAAGTCACAGTGCAAGG | 46 |
| ESSalt2-02 | | | ATTAAAGGTAG | |
| N3-13 + N5-02 | ATGATAGGGACTTAGGGTGA | 11 | CATAAGTCACAGTGCAAGG | 46 |
| | | | ATTAAAGGTAG | |
| N3-13 + N5-10 | ATGATAGGGACTTAGGGTGA | 11 | CATAAGTCACAGTGCAAGG | 46 |
| | | | ATTAAAGGTAG | |
| N3-13 + N5-06 | ATGATAGGGACTTAGGGTGA | 11 | CATAAGTCACAGTGCAAGG | 46 |
| | | | ATTAAAGGTAG | |

TABLE 4C

| Construct Name | Relative NMD Transcript Level |
|---|---|
| N5-ESSalt2-15 | 0.4261 |
| N5-ESSalt2-02 | 0.2451 |
| N5-02 | 0.2341 |
| N5-10 | 0.2836 |
| N5-06 | 0.2631 |
| N3-13 + N5-ESSal2-15 | 0.6895 |
| N3-13 + N5-ESSalt2-02 | 0.7586 |
| N3-13 + N5-02 | 0.6593 |
| N3-13 + N5-10 | 0.6043 |
| N3-13 + N5-06 | 0.7126 |

### Example 4: Validation of U7 Candidates Identified in Screen in Post-Mitotic Cells

[0264] Two candidates identified in Example 1 (Candidate 1: N5-ESSalt2-15 and Candidate 2: N5-05) were further tested for their ability to increase production of the productive transcript. First, AAVs encoding these two constructs were produced and systemic injection of wildtype mice at P28 was performed. Brain tissue was collected at 4-weeks post-injection and levels of productive and NMD transcripts were assessed. Although widespread AAV transduction was observed in the brain, there was no significant reduction of NMD transcript levels or increased productive Scn1a transcript levels (FIG. 5). Endogenous U7 expression is regulated by the cell cycle, suggesting that expression may be weak in post-mitotic cells of the central nervous system. Thus, additional approaches were explored to assess whether increasing U7 expression could overcome this barrier, resulting in efficient splice modulation in the central nervous system.

[0265] To increase U7 expression, AAV constructs encoding an array of four U7 expression cassettes of either candidates 1 or 2 were generated. Each construct contained 4 U7 cassettes, each consisting of the U7 promoter, ESS, antisense sequence, smOPT, hairpin, and 3′ terminator sequence separated by a spacer consisting of random nucleotides. Primary mouse hippocampal neurons were treated with the AAVs expressing the U7 cassettes of candidates 1 or 2 and then cultured for 1 week. After 1 week of culture, RNA was collected and analyzed for the amount of NMD transcript and the productive transcript via end-point RT-PCR. FIG. 6 shows control cells treated with the scrambled U7 sequence express low amounts of the productive transcript but high levels of NMD transcript, as evidenced by the weak low molecular weight band (productive transcript) and the strong high molecular weight transcript (NMD transcript). All samples treated with either U7 candidate 1 or 2 show near-complete suppression of the NMD transcript and high levels of the productive transcript. This example demonstrates that increasing the expression levels of the candidate U7 constructs through increasing U7 cassette copy number can suppress inclusion of the NMD transcript and increase expression of the productive transcript in post-mitotic neuronal cells.

### Example 5: In Vivo Validation of U7 Candidates

[0266] Wild type C57Bl/6J mice were injected at P28 with varying doses of AAVs encoding 4 copies of either scramble, candidate 1 or candidate 2 U7 cassettes (described in Example 4). At 3-weeks post injection, RNA and protein were isolated from brain tissue. Analysis of NMD transcript levels showed that the 4×U7 constructs can suppress NMD transcript formation in a dose-dependent manner. High-dose delivery of AAV can almost completely suppress NMD transcript production and nearly triple productive transcript levels (FIG. 7). Western blot analysis of protein confirmed NaV1.1 levels were double those of control samples in animals injected with 4×AAVs (FIG. 8). This example shows that both U7 candidates expressed via AAV are able to suppress NMD transcripts and increase productive transcripts at both the mRNA and protein level in vivo when expressed at sufficient levels.

### Example 6: Additional Vector Modifications

[0267] Although administration of high doses of AAVs expressing the U7 candidates resulted in near-complete elimination of NMD transcripts in vivo, delivery of AAV-based gene therapies to the human brain suffer from low efficiency, both in terms of cell numbers and genome copies transduced per cell. Based on this observation, designing gene therapy vectors with high molecular efficacy even at low genome copies per cell is imperative for clinical success. To increase U7 expression from each construct the U7 promoter and the 3′ termination signal sequence were modified. Like U7, expression of the U1 family of small RNAs is regulated by RNA polymerase II. However, U1 RNAs are ubiquitously expressed at high levels compared to U7. Based on this observation, the 5′ and 3′ regulatory elements of U1 were tested for their ability to drive stronger expression of the U7 backbone compared to the endogenous U7 sequences. Additionally, the RNA polymerase II dependent element was switched out with the standard PolII-dependent promoter (ex. EF1alpha) to test the ability of the standard PolII-dependent promoter to increase U7 expression. These two concepts were tested by engineering constructs comprising the human HU1-1 promoter or the EF1alpha core promoter. The HU1-1 and U7 3′ regulatory elements may be important for proper folding and functional U7 expression, so the different promoters were paired with either the standard U7 3′ signal or with the U7 3′ signal immediately followed by the HU1-1 3′ signal (Table 1). Initial testing of the ability of these constructs to suppress Scn1A NMD transcript inclusion in Neuro-2a cells was done with a set of U7 expression plasmids with either the scramble targeting sequence or the Candidate 1 targeting sequence. However, analysis of NMD transcript levels showed that these vectors lacked functional U7 activity (FIG. 9). Functional expression of snRNAs relies upon proper RNA folding after transcription, which is orchestrated by protein factors recruited by the distal and proximal sequence elements (DSE and PSE) encoded by snRNA promoters, as well as regulatory sequences located within the transcriptional terminator sequences. Thus, two potential reasons why this initial set of vectors with modified regulatory elements failed are 1) improper recruitment of accessory factors by the EF1a promoter and 2) incorrect secondary structure formation due to combined effects from the promoter and 3′ signals. To test this, U7 constructs with ESS/antisense candidate 1 were engineered by combining the core U7 structure (ESS-antisense sequence-smOPT-hairpin) with varying combinations of the mouse U7 promoter, mouse U1a1 promoter, human U1-1 promoter, mouse U7 promoter with its distal sequence element replaced with that of the human U1-1 and its proximal sequence element replaced with that of mouse U1a1, and either the mouse U7 3′ terminator or the human U1-1 3′ terminator. The different combinations were then tested for their ability to suppress SCN1A NMD transcript inclusion in cultured primary cortical neurons. The mu1a1 promoter paired with either the HU1 terminator or U7 terminator was as efficient or greater than the 4× standard U7 array, but the U7 promoter with modified PSE and DSE elements worked less efficiently (FIG. 10). Pairing the HU1 promoter and terminator did not result in any functional U7 expression (FIG. 10). AAVs encoding these U7 constructs were then injected into wildtype mice at a low dose and their ability to increase NaV1.1 levels through their suppression of SCN1A NMD transcript formation was assessed. Based on NaV1.1 protein levels, pairing the mu1a1 promoter with the HU1 terminator or U7 terminator once again outperformed the standard 4×U7 array. In contrast to experiments in human neurons, replacing the U7 promoter DSE and PSE with that of mu1a1 was also capable of increasing functional U7 expression (FIG. 11). Once again, the combination of the HU1 promoter and terminator did not result in any functional U7 expression. This example shows that multiple combinations of promoters and 3′ terminal sequences are sufficient to increase functional U7 expression and ultimately the production of NaV1.1 in vivo when compared to wild-type U7. However, not all promoter/terminator combinations are functional and there can be species-specific differences in the efficiency of those that are function, as demonstrated by the (mu1a1)U7 promoter.

### Example 7: Therapeutic Validation of U7 Candidates

[0268] To test the therapeutic potential of a modified U7 construct identified in Example 6 (mu1a1-Candidate 1-HU1), AAV encoding a 3× array of this candidate was produced. The AAV was then systemically injected into Scna1 heterozygous mice via retroorbital injection at postnatal day 14. Beginning at approximately postnatal day 17, untreated Scn1A heterozygous mutants begin to spontaneously die from sudden epileptic death. To test the efficacy of the U7 construct, the survival in a cohort of animals injected with either the modified U7 vector or a scramble control was evaluated, along with Scn1a transcript and NaV1.1 levels. Significant rescue of the spontaneous death phenotype was observed, with 11/12 U7-injected animals surviving until P55 compared to 10/20 scramble-injected animals (FIG. 12). At ~P55, whole brain tissue of surviving animals was harvested and the levels of Scn1A NMD transcript, the total Scn1A mRNA, and the NaV1.1 protein were assessed. A significant reduction of NMD transcript levels (FIG. 13), an increase in total Scn1A transcript levels (FIG. 14), and a 58% increase in NaV1.1 levels compared to scramble-injected heterozygous mutants (FIG. 15) was observed. This example demonstrated a strong molecular and functional rescue of Dravet-associated phenotypes in a disease-relevant Scn1A mutant mouse model.

### Example 8: Therapeutic Validation of U7 Candidates

[0269] This example continues the experiments of Example 7. The therapeutic potential of an optimized U7 vector, referred to here as Candidate 3 (scAAV-(3×)mu1a1-N5-06-HU1), was tested via EEG-based analysis of seizure suppression. Candidate 3 is a different configuration of Candidate 2, and includes a self-complementary AAV (scAAV) driving a 3× array of mu1a1-Candidate 2-HU1. Scn1a^{+/-} mice were administered 5e10 vector genomes (vg) of Candidate 3 packaged with AAV9 capsid via ICV injection at postnatal day 2. EEG electrodes were implanted at ~P20 and EEG recording was subsequently performed between P24 and P45. Analysis of saline-injected controls showed significant seizure activity, with 10/15 animals experiencing spontaneous seizures at an average rate of >1 seizure per 24-hour period (FIG. 16). In contrast, only 2/14 animals injected with AAV encoding Candidate 3 exhibited spontaneous seizure activity at an average rate of <0.5 seizures per 24-hour period (FIG. 16). AAV-injected animals exhibiting spontaneous seizures also showed a trend toward shorter seizure durations (FIG. 17). To assess potential differences in efficacy related to delivery method and timing, additional survival studies were performed with AAV9-packaged virus injected via ICV at P2 (5e10 vg) and PHP.eB-packaged virus injected at P14 (1e14 vg/kg). Injection at both timepoints showed near-complete suppression of SUDEP (FIGS. 18-19) and analysis of brain tissue collected from surviving animals at P90 revealed robust rescue of NaV1.1 protein levels (FIG. 20-21). Last, to assess target engagement in human neurons, differentiated ReNcell CX cultures were treated with either AAV formulation buffer or 1e10 vg, 1e11 vg, or 2.5e11 vg of AAV encoding Candidate 3 and cultured for 7 days. Purified RNA was used for end-point RT-PCR to assess suppression of NMD isoform production, as well as production of productive isoform. RT-PCR showed dose-dependent suppression of NMD isoform splicing (FIG. 22) with concomitant up-regulation of productive SCN1A isoform production (FIG. 23), validating the target engagement with Candidate 3 across species. These data support the use of Candidate 3 for therapeutic restoration of NaV1.1 levels in the treatment of SCN1A haploinsufficiency disorders.

### Example 9: Platform Expansion and Validation of Promoter/Terminator Combinations Driving U7 Expression and U7-Mediated Splice Modulation

[0270] Given the success in improving programmed U7-mediated splice modulation with promoters and terminators from the U1 family of snRNAs, the platform was extended by testing additional combinations of promoter and terminator regions from mouse and human snRNAs. Because some core promoter and terminator elements are not well-defined for all small RNAs across species, regions of ~500 bp upstream and downstream of the coding regions of human and mouse small RNAs were selected for testing. A library of constructs, each encoding an engineered U7 snRNA targeting exon 13N of mouse Scn2a driven by one of 529 combinations of the chosen promoters and terminators was generated (Table 7A). Construct fragments in Table 7A were named sequentially in the order of a three-digit fragment ID number, a recombinant promoter sequence (SEQ ID NOs: 6 and 318-340 from Table 5), a U7 core sequence (Table 7B), and finally a recombinant 3′ signal/terminator sequence (SEQ ID NOs: 10 and 341-363 from Table 5), and were constructed 5′ to 3′ in the same order.

[0271] To screen for the ability of these promoters and terminators to drive high levels of functional U7 expression, a luciferase reporter with the following features was generated: a relatively weak ubiquitous promoter (Ubc-SV40 pA), a canonical Kozak sequence, a fragment of mouse Scn2a exon 13, a fragment of mouse Scn2a intron 13, mouse Scn2a exon 13N, another fragment of mouse Scn2a intron 13, and a fragment of mouse Scn2a exon 14 fused in-frame to firefly luciferase (Table 6, FIG. 24). Under normal conditions a significant fraction of transcripts include exon 13N, which is out-of-frame and leads to nonsense-mediated decay, thus reducing luciferase levels. Successful suppression of exon 13N inclusion by U7 results in proper in-frame expression of luciferase, which can be read out via luciferase enzymatic activity.

[0272] Using this system a candidate ESS and U7 antisense sequence were identified that can efficiently suppress exon 13N inclusion and increase luciferase activity when driven by the combination of the mu1a1 promoter and HU1 terminator. The screen was then validated in mouse Neuro-2a cells, where it was demonstrated that treatment with multiple candidate mu1a1-ESS-Scn2a-U7-HU1 plasmids identified in the screen could efficiently suppress Scn2a exon 13N splicing and increase productive Scn2a transcript levels (FIG. 25). Virus was also produced using three different U7 targeting sequences identified with this system and transduction of differentiated ReNcell CX cultures revealed significant up-regulation of Nav1.2 levels (FIG. 26), verifying that the luciferase reporter activity faithfully predicts modulation of splicing of endogenous transcripts.

[0273] Using this validated system, Neuro-2a cells were co-transfected with the luciferase reporter, a control plasmid expressing Renilla luciferase, and individual plasmids from the 529 candidates in this example. The library was split into 6 sub-libraries and each plate was screened in triplicate. Multiple control plasmids were included on each plate for reference. Following 24 hours of culture, average firefly luciferase levels, normalized to renilla luciferase, were calculated for each construct and an ANOVA was run for each sub-library to identify promoter/terminator combinations capable of significantly suppressing exon 13N inclusion, a direct proxy for functional U7 expression. Across libraries, 324/529 promoter/terminator combinations resulted in a statistically significant increase in luciferase activity (Tables 8-13). In line with previous findings that functional combinations are not obvious, even when combining elements from the same gene and species, there were many instances where a given promoter was only functional with the terminator of a different gene or species, suggesting there are unknown sequence determinants required for functional U7 expression. Together, these studies identify a suite of promoter/terminator combinations capable of driving high levels of functional U7 expression and expand the toolkit of regulatory elements for use of U7-mediated splice modulation.

TABLE 5
Example Regulatory Elements

| Sequence | | SEQ ID |
|---|---|---|
| Name | Sequence | NO: |
| Mm U7 | Aacaacataggagctgtgattggctgttttcagccaatcagcactgactcatttgcatagccttta | 5 |
| Promoter | caagcggtcacaaactcaagaaacgagcggttttaatagtcttttagaatattgtttatcgaaccg | |
| | aataaggaactgtgctttgtgattcacatatcagtggaggggtgtggaaatggcaccttgatctca | |
| | ccctcatcgaaagtggagttgatgtccttccctggctcgctacagacgcacttccgc | |
| Mm U1a1 | TAAAGACTGTGCATCCGACTCCTACATTTATGAAAGTAAATGCCTATTGTTAG | 6 |
| (a.k.a. mu1a1) | AACAAAAAAGGCTACAGAACAAAAAACAAAGCGAAATACCATCTGCTTTAGG | |
| Promoter | TTCAGTGGTATTTTCCCGCTGACAGGGAGGCGGGTTTTTGGGTACAGGAAACG | |
| | AGTCACTATGGAGGCGGTACTATGTAGATGAGAATTCAGGAGCAAACTGGGA | |
| | AAAGCAACTGCTTCCAAATATTTGTGATTTTTACAGTGTAGTTTTGGAAAAAC | |
| | TCTTAGCCTACCAATTCTTCTAAGTGTTTTAAAATGTGGGAGCCAGTACACAT | |
| | GAAGTTATAGAGTGTTTTAATGAGGCTTAAATATTTACCGTAACTATGAAATG | |
| | CTACGCATATCATGCTGTTCAGGCTCCGTGGCCACGCAACTC | |
| Hs U1-1 | aacaacataggagctgtgattggctgttttcagccaatcagcactgactcAGGGCGACTTCTATGT | 7 |
| Promoter | AGATGAGGCAGCGCAGAGGCTGCTgcctttacaagcggtcacaaactcaagaaacgagcggtttta | |
| | atagtcttttagaatattgtttatcgaaccgaataaggaactgtgctttgtgattcacatatcagt | |
| | ggaggggtgtggaaatggcaccttgatGGGAGTGCGCGAGGCAAGTGACCGTGTGTGgagttgatg | |
| | tccttccctggctcgctacagacgcacttccgc | |
| Modified Mm | aacaacataggagctgtgattggctgttttcagccaatcagcactgactcAGGGCGACTTCTATGT | 8 |
| U7 Promoter | AGATGAGGCAGCGCAGAGGCTGCTgcctttacaagcggtcacaaactcaagaaacgagcggtttta | |
| | atagtcttttagaatattgtttatcgaaccgaataaggaactgtgctttgtgattcacatatcagt | |
| | ggaggggtgtggaaatggcaccttgatTTACCGTAACTATGAAATGgagttgatgtccttccctgg | |
| | ctcgctacagacgcacttccgc | |
| hRNU1-1- | TTTCTTTTGTAATCCGAAACATTCTAGTCTGCGAATTAAAAGCCATTATTTGAA | 318 |
| Promoter | GAAGGATGCCCCGGCTCCATCTGGCCACCGAAAGATTGCTCCTTAACACAGG | |
| | CTAAGGACCAGCTTCTTTGGGAGAGAACAGACGCAGGGGGGGGAGGGAAAA | |
| | AGGGAGAGGCAGACGTCACTTCCTCTTGGCGACTCTGGCAGCAGATTGGTCG | |
| | GTTGAGTGGCAGAAAGGCAGACGGGGACTGGGCAAGGCACTGTCGGTGACAT | |
| | CACGGACAGGGCGACTTCTATGTAGATGAGGCAGCGCAGAGGCTGCTGCTTC | |
| | GCCACTTGCTGCTTCGCCACGAAGGGAGTTCCCGTGCCCTGGGAGCGGGTTCA | |
| | GGACCGCTGATCGGAAGTGAGAATCCCAGCTGTGTGTCAGGGCTGGAAAGGG | |
| | CTCGGGAGTGCGCGGGGCAAGTGACCGTGTGTGTAAAGAGTGAGGCGTATGA | |
| | GGCTGTGTCGGGGCAGAGGCACAACGTTTC | |
| hRNU1-2- | GTTTCTTCTGTAATCCGAAACATTCTAGTCTGCGAATTAAAAGCCATTATTTGA | 319 |
| Promoter | AGAAGGATGCCCCGGCTCCATCTGGCCACCGAAAGGTTGCTCCTTAACACAG | |
| | GCTAAGGACCAGCTTTTTTGGGAGAGAACAGACGCAGGGGGGGGAGGGAAA | |
| | AAGGGAGAGGCAGACGTCACTTCCTCTTGGCGGCTCTGGCAGCAGATTGGTC | |
| | AGTTGAGTGGCAGAAAAGCAGACGGGGACTGGGCAAGGCACTGTCGGTGAC | |
| | ATCACGGACAGGGCGACTTCTATGTAGATGAGGCAGCGCAGAGGCTGCTGCT | |
| | TCGCCACTTGCTGCTTCGCCACGAAGGAGTTCCCCTGCCCTGGGAGCGGGTTC | |
| | AGGACCGCGGATCGGAAGAGAGAATCCCAGCTGTGTGTCAGGGCTGGAAAGG | |
| | GCTCGGGAGTGCGCGGGGCAAGTGACCGTGTGTGTAAAGAGTGAGGCGTATG | |
| | AGGCTGTGTCGGGGCAGAGCCCGAAGATCTC | |
| hRNU1-3- | GTTTCTTTTGTAATCCGAAACATTCTAGTCTGCGAATTAAAAGCCATTATTTGA | 320 |
| Promoter | AGAAGGATGCCCCGGCTCCATCTGGCCACCGAAAGGTTGCTCCTTAACACAG | |
| | GCTAAGGACCAGCTTCTTTGGGAGAGAACAGACGCAGGGGGGGGAGGGAAA | |
| | AAGGGAGAGGCAGACGTCACTTCCCCTTGGCGGCTCTGGCAGCAGATTGGTC | |
| | GGTTGAGTGGCAGAAAGGCAGACGGGGACTGGGCAAGGCACTGTCGGTGAC | |
| | ATCACGGACAGGGCGACTTCTATGTAGATGAGGCAGCGCAGAGGCTGCTGCT | |
| | TCGCCACTTGCTGCTTCGCCACGAAGGAGTTCCCGTGCCCTGGGAGCGGGTTC | |
| | AGGACCGCGGATCGGAAGTGAGAATCCCAGCTGTGTGTCAGGGCTGGAAAGG | |
| | GCTCGGGAGTGCGCGGGGCAAGTGACCGTGTGTGTAAAGAGTGAGGCGTATG | |
| | AGGCTGTGTCGGGGCAGAGCCCGAAGATCTC | |
| hRNU2-1- | TCTCCCCGCCCGCGGGCGGCGAAGTAAAGGCCCAGCGCAGCCCGCGCTCCTG | 321 |
| Promoter | CCCTGGAGCCTCGTCTTTCTCCAGGAAAACGTGGACCGCTCTCCGCCGACAGG | |
| | TCTCTTCCACAGACCCCTGTCGCCTTCGCCCCCGGTCTCTTCCGGTTCTGTCTT | |
| | TTCGCTGGCTCGATACGAACAAGGAAGTCGCCCCCAGCGGAGCCCCGGCTCC | |
| | CCCAGGCAGAGGCGGCCCCGGGGGCGGAGTCAACGGCGGAGGCCACGCCCTC | |
| | TGTGAAAGGGCGGGGCATGCAAATTCGAAATGAAAGCCCGGGAACGCCGGA | |
| | AGAAGCACGGGTGTAAGATTTCCCTTTTCAAAGGCAGAGAATAAGAAATCAG | |
| | CCCGAGAGTGTAAGGGCGTCAATAGCGCTGTGGACGAGACAGAGGGAATGG | |
| | GGCAAGGAGCGAGGCTGGGGCTCTCACCGCGACTTGAATGTGGATGAGAGTG | |
| | GGACGGTGACGGCGGGCGCGAAGGCGAGCGC | |
| hU3-Promoter | CCAACAAGAGAGACCCTCATCTCTACAAAATATTTTTTAAAATAACTGGGCCT | 322 |
| | CATGGTGCATTCCTGTAATCTGAGCTAGTTGGGAGGATAGCTAGAGCCCAGG | |
| | AGATCGAGGCTGCAGAGAACCGTGATCACACGACTGCACTCCAGCCTGGGTG | |
| | ACAGAGCAAGACCCTGTCTCAATAGATAGATAGATAGATAGATAGATAGATA | |
| | GATAGATAGATAGATAGATAAAAACAGAGAGGTGAAAAATATGGTTTTAAGG | |
| | GTTCTGTTTAAGAATACTCTGTTCCAACATGGAGTTTGTCAACTCTAAAGTGG | |
| | TAAAAAACAAGACAGATTGTAGACATTTTCATAAAAGGCAGGATTATTTGGT | |
| | GTCACCAAATTAAATATGTTAATGGTCACAGCGGAGGCCGACTCAATCAGCCT | |
| | TTTATTCTGCCAGGCTATTTGATACTGCTGAGGGCTTACCTATTTCCTGAGGAG | |
| | AAAAATAGTCATTAAAATGACCTTATA | |
| hRNU4-1- | GGGCATGAAAGATAAAGTTCTGGAGGTAAGTAGTGATGATGGTTACACAACA | 323 |
| Promoter | ATGTGAACATATTCTATGCCAGTGAATTTACACTTAAGGTTAAAATGGTAAAT | |
| | TTTATGTATACTTTGGCATAATTTAAAAAAAAGTTTGAAAAAGAAAAAAGAC | |
| | AAAACAATAATCGTCTTTGGAGAAGTCTGTTACACTGAATCTGGAGCCAAGTG | |
| | AACAGAACCCTGATTTTGATCCCTTTTCTCTCAAAAGCCCTTCGCAGTCTCTGA | |
| | ATTAAGTCTATTAGCATGTTCCTCCCATAGTGCTTTGCTTCATATCAACAAAAA | |
| | CCTAGCTAAGTGAAATCAGCAACGATATGCAGAAACCACCTACGCAGGTCAC | |
| | AAACATCTTTCTATGATTGTATAATTTTCAAGCAAGCAATAAGTGAAGATTTT | |
| | TCCATAGGCCCTAAACTCACCTTTGCGAAATAGGAAGCTGGTTTATTGGGAGT | |
| | GATGAGCAGGGGGCGTAACAAATT | |
| hRNU5A-1- | GAGACAGGGCTTAAAAGTCCTGGGCAATTAGCTGGGCACAGTGTCGTGCGCC | 324 |
| Promoter | TGTAATCCCACCTAGTTGGGAGGCTGAGGCAGAAGAATCTCTTGAACCCGAG | |
| | GTAGAGGTTGCAGTGAGCCGAGATCGCGCCACTGCACTCCAGCCTGGATGAC | |
| | AGAGTGAGACCCTGTCTCAAAAAAAAAAAAAGTCCTGGGCAGCAAGGCCTCC | |
| | ACTTCACCCCCTAAAGGTTGCCCCAAGAGCACCGTGTGACTGCTAAGGTATTT | |
| | CCGGAGTCTAAAGACGATTATTCAGGTCTCATTTGCATACCCATAATACACTG | |
| | CAAACAGTATTTTTTTCGGAAAAACATTTATATATTGCTTGACATTTTTAAGTA | |
| | TGAGAATTTTGCATGCAGAATTTTTTTGTATAAACTTTCTCAGGTAGTAACCCT | |
| | TGGGATTAGTAGACACCATCAGTGTACTAGGAATTGCAGTTACCCGAAAATTG | |
| | AGTTACAGAAGTAACTGGT | |
| hRNU6-1- | CGACTCGCAACCTTTTCGGGGTCCCGAGTCCAACACCCGTGGGAATCCCATGG | 325 |
| Promoter | GCACCATGGCCCCTCGCTCCAAAAATGCTTTCGCGTCGCGCAGACACTGCTCG | |
| | GTAGTTTCGGGGATCAGCGTTTGAGTAAGAGCCCGCGTCTGAACCCTCCGCGC | |
| | CGCCCCGGCCCCAGTGGAAAGACGCGCAGGCAAAACGCACCACGTGACGGA | |
| | GCGTGACCGCGCGCCGAGCGCGCGCCAAGGTCGGGCAGGAAGAGGGCCTATT | |
| | TCCCATGATTCCTTCATATTTGCATATACGATACAAGGCTGTTAGAGAGATAA | |
| | TTAGAATTAATTTGACTGTAAACACAAAGATATTAGTACAAAATACGTGACGT | |
| | AGAAAGTAATAATTTCTTGGGTAGTTTGCAGTTTTAAAATTATGTTTTAAAAT | |
| | GGACTATCATATGCTTACCGTAACTTGAAAGTATTTCGATTTCTTGGCTTTATA | |
| | TATCTTGTGGAAAGGACGAAACACC | |
| RNU7-1- | CAAAGCCGGTTATGAAGCGGGGGTGGGGTGGGCTAGTTTTAATAGGTCCAGG | 326 |
| Promoter | CGATTAGTACCTGGCATCCTTAACCACCTACAGTTTGAGAAGGGAGTGGGTGA | |
| | TAAAAGCCTGGAAGGGAAGGGAAATCGGGCCGGGCATTAGGCTCCATCGCTC | |
| | ATCAATAGACAAGGCCTTTAGGAAACTGCGACAACGGCTTTTGCTCTGGGCCT | |
| | TTACTGCCGAATCCAGGTCTCCGGGCTTAACAACAACGAAGGGGCTGTGACT | |
| | GGCTGCTTTCTCAACCAATCAGCACCGAACTCATTTGCATGGGCTGAGAACAA | |
| | ATGTTCGCGAACTCTAGAAATGAATGACTTAAGTAAGTTCCTTAGAATATTAT | |
| | TTTTCCTACTGAAAGTTACCACATGCGTCGTTGTTTATACAGTAATAGGAACA | |
| | AGAAAAAAGTCACCTAAGCTCACCCTCATCAATTGTGGAGTTCCTTTATATCC | |
| | CATCTTCTCTCCAAACACATACGCAG | |
| hRNU11- | CACGCCTGCCTGGGCTGCTCCAAGGTGGTGGCTAGGGGTGGCACAAGTTACA | 327 |
| Promoter | CATTTTCAATTTGGATAGGTTGTGATTCTTGTCTTCCCCAGTCAGATACCTACA | |
| | GCCGCTGAGAGCCGGTATTCCAACGCCATGAGACGCCTTCTGTCGTGAGCAGT | |
| | TGACAAGAAAGACCCAGCACTTACTGCAACCGGAAGGAGCGGTTCCTCCCTC | |
| | GCTCGCGCAGCCGCTCTTCCCCGCCACTCCCTCGGTGCCCGCCAGCACATTCC | |
| | CAGCAAGCCCTGAGTATATTTGCATATCAACTCACTACATTTTTTTCTTCTAAC | |
| | TAAAAAATCGAAAGGACAAATTCCAGATTCTCCTTGTGAAGTCTTCCTTTCAG | |
| | TTCAGAAGAAATGGAATTCGCTCTTCAACTTCAGGAAGTTGAAATAAAGAGTT | |
| | GCTTGGATTTTGTGTTCACCTTTACCAAAAAATGGATTTGGTAACACTGCCAC | |
| | CCTGCTTTGGTGACAGAGAAAGC | |
| hRNU12- | TCGAGCTCCACTAGGCCGAGGACCCTAAACCCCGAAGAAAGGAAAGGCCTCT | 328 |
| Promoter | CACCGTCCTTTCGCCGCCGCCCCGCGCTTCCTGATGAGTTCGTCCAGGGAGAT | |
| | GTCCGCCATCTTGCTCCGCCGAGCAAGCCGAAAGCAGTCGAGACCCCGCGAG | |
| | CCCGCCCCTTCGGCCGCTAGGGAGCGACGAACTACTTCCGGCGTCCGCGGACC | |
| | AACTCTCGCGACAGCCAGCTCAAAGCAGGCAAGAACCGGAAGGGGGGGGA | |
| | CGTTCCCCGTGAGCCTTCGCGGTGCTGGCTGCTCATCTGCATACGGAAGTTCG | |
| | GCACATTATGAATTATTTATTTTCCTCGAGGGAAAAAATTAAATGAAAAGCAA | |
| | CAAAATACATTATTAACAAGTGAGACAAACTTCAATGGAACTGGATCATGAC | |
| | CTCAACAGTCAACTACGATAGTCATCATACGCCTAATGAGAATAGAATTCATT | |
| | ACCTAGGAAATAAACTAAAAACGTCCTT | |
| hRN7SK- | GACAAGAGAAGGACTGAACTGGGGGAGTGAGGGAAGAATGCGAGAGTGAGA | 329 |
| Promoter | CTCAGAGAGTAAAGGGGAGGGAAAAAAAAGAAGAGAGAAAGGGCGAGGAA | |
| | GGGGGCGACCGCAGGAGGGAGACAGACCTGGAGTCCACTCGGAGGCCTGGA | |
| | GCCGCACAAAGCGCCAGGTCAGCGGTCCCGGCTGGGTGAGACCAGCAGGCGG | |
| | CTCTAGCGCGCGGGAGCTGGGCGAGGCTCCGGGACGACCTCACCAATGGAGA | |
| | CTGCAGTATTTAGCATGCCCCACCCATCTGCAAGGCATTCTGGATAGTGTCAA | |
| | AACAGCCGGAAATCAAGTCCGTTTATCTCAAACTTTAGCATTTTGGGAATAAA | |
| | TGATATTTGCTATGCTGGTTAAATTAGATTTTAGTTAAATTTCCTGCTGAAGCT | |
| | CTAGTACGATAAGCAACTTGACCTAAGTGTAAAGTTGAGACTTCCTTCAGGTT | |
| | TATATAGCTTGTGCGCCGCTTGGGTACCTCG | |
| mRnu1a1- | CACAAGTAATGTACTTTTAAAATTAACCTTTCTATACCGGTTTTCACAGTGCG | 330 |
| Promoter | GCTGTTTTTGTTGTTCCTCTTAGTGTTAATTCACACTAAAGACTGTGCATCCGA | |
| | CTCCTACATTTATGAAAGTAAATGCCTATTGTTAGAACAAAAAAGGCTACAGA | |
| | ACAAAAAACAAAGCGAAATACCATCTGCTTTAGGTTCAGTGGTATTTTCCCGC | |
| | TGACAGGGAGGCGGGTTTTTGGGTACAGGAAACGAGTCACTATGGAGGCGGT | |
| | ACTATGTAGATGAGAATTCAGGAGCAAACTGGGAAAAGCAACTGCTTCCAAA | |
| | TATTTGTGATTTTTACAGTGTAGTTTTGGAAAAACTCTTAGCCTACCAATTCTT | |
| | CTAAGTGTTTTAAAATGTGGGAGCCAGTACACATGAAGTTATAGAGTGTTTTA | |
| | ATGAGGCTTAAATATTTACCGTAACTATGAAATGCTACGCATATCATGCTGTT | |
| | CAGGCTCCGTGGCCACGCAACTC | |
| mRnu1b1- | AGTCCTTGCTCTTAACTACTGAACCAACTCTCCCGTCCTATAAGTAAATTTTCA | 331 |
| Promoter | GAGCACTAATCTATTCTACTTCAAGTTTCTCCTGCATCAGATCCAGGCCAGCT | |
| | GGAGCGAGCTACACGGTTACCCCCCCTCCTCCCAAAGGGGAAAATAAGGATC | |
| | AGGTGAAAATGTTTGGAAATTACAATAGTAGAATATAAAGAAAGAATATGAA | |
| | GGCGGCCATGAAGGGGTAGAAAGGTAGATGACCAGGCGTCATCCCTGATGTC | |
| | ACGGGTATGGGCGTGGTGTATGCAGATAAGCGCGCAGGGTCTGCCGGGTCCG | |
| | CGCTCCGTGCAGAAATGTGAGGGGTTTCTCCCGCGGCGAGGGAGGGAGCGCG | |
| | GATACGCGGGTGTCAGCAGAGCGCAAGAATGTCGTGTGCGACGAGGGAGACC | |
| | CGAGATCGGCCAGGGCTAAGTGACCGTGTGTTAAGAGTGTAGAGGCGACGGG | |
| | TGTGAGCCGGGGCCGGGCAGTGGGAAAGC | |
| mRnu1b6- | CGGTGGGGCTGGCTCCTGTGCTGCCCGACTCCTGTGCTCCGACTTGGAGAAGA | 332 |
| Promoter | CGGGCGTCCGTTCGTCCATACCCAAAAGAGTCGGCCACAAGGATGTTGGCAC | |
| | CTGGGGGTGGGCCACGAGCGGCCAGTTAGGGGTAAGAGACGGTGCAAGGTG | |
| | ACTTGTCCCTGGTCCTTCACCGCTCCAGCACTGCGCCAGTGAGAAAGTCCAAC | |
| | AGGCCCCGGGATCGGGCGGCGAAAGGAAGGGGCGTGATGTCACTCCTGGGTG | |
| | GCTGACGGGGGGGGGTGTATGCAGATGAGGGTCGCGCAGGGGCTGCGGCGTC | |
| | CGCAGCGGCCGGGGAAACGCGAGAGATTTCTCGCGCGGCGTGGGAGAGAAC | |
| | GCGGGTCGCCAGATGTCAGCGGAGCGCCGAGACGGCGTGTGCGACGAGGGA | |
| | GACCCGAGATCGGGCGGGGCTAAGTGACCGTGTGTTAAGAGTGCAGGGGCGG | |
| | CGGGTGTGAGCCGGGGCCGGGCGCTGGGAGAGC | |
| mRnu2-10- | GCTCCTCCTAGGAGCTAACACTGGAGCCAGGGGGATCAAAGCTGTGTAGTGA | 333 |
| Promoter | GTGTCACAAAACATCCTAGCACTAAGGAGACTGAGACGGGAACATTGTAGTA | |
| | AGTTCTAGCCTGGGCTACAGTAAGAGACGTAGTCTCAAACAAGGAAATGCGC | |
| | TATAAATAAATAAGATGGAGCTTCAATGGTCTGTGCATAACTGGGGGGTTGA | |
| | AGGAGCCTTCCAAAGGCTGGGTTCCGGCTCCGTTCAGTCGTTGACTTGAGCTG | |
| | GGCGGGGCATGCAAATAAGGACGCCGCCTGGTCTCCGCGGAACTCTGGGAAC | |
| | GAAAAGCGCAACAAAATCCTCTCGGCCCCCTTGGATTCCTCGGGCTTTCCCTG | |
| | GCGTAAAGGTGGTGGACAGGATAGAAGAGGAGTTTCGGCGTCGGGCGCGTGT | |
| | TTGCGGTCGCGCGAGTGTTGGCGACCGTGAGTTGAAGGTGTGTGTGGTGTTGA | |
| | GTGTATGGGGCGTGTGGGCGCAGTTCGGT | |
| mRnu3b1- | ACAGAATTTACTAAATAGAGAGTGCAGTCATGGAATTGCCATTTTCCCCACGT | 334 |
| Promoter | GGTTTTTCGTTTGTTCCTCACCGGAGGCCTCCGGTTTGAGCCCGAAGTCTAAA | |
| | CCGGTGCGCGTCTGCGAGCTCGCGTGCGCCTCCGCGGCCGGAGCACAGTCGC | |
| | GGGCGGGCATCAGGGCGGTGCGTGGCCGTCAGTGACGCATGACCCTTCGCAG | |
| | GCAGAAGTGGGACGGGTCAAGAGAGGACTGTGATCCGATTGGCTGTTCGGCG | |
| | ACCGTATGCTAATCGCGGTGACAGTCTGCGTGGTGTAGGGACACGGTAGCGA | |
| | CTCAAAATGCCCCGTGGACGGGGTCTGGAGAGGTGTCGGTCTGTCAGAGAAG | |
| | GTGTCCCCGCGAGGGCAGACGCGGTGTGAGATAGAGGCGCGGACAGGGATGT | |
| | CACGGGTCGTCTGTGCGTCAGTCGCCGTGACTAAGATGTGGGGGCGGCCGGT | |
| | GCAGTGCGGCGCGGTGTGGAGCGTGAGGTTT | |
| mRnu5g- | TTATCTACGTTGGTTTTACTACAGAAACTACTGTTCTCAGTAAAAGCAGAGAG | 335 |
| Promoter | AGTACAATGCCAACAGCTTTGAAATCCTCTGTGCTCTTGTGCCAATCCCACCC | |
| | TCAGAACAGGGAGTCTGTCGGTTATGTTTTCGTCCTTTACAGTTCTTCGCCGTC | |
| | TAATCCATTGGAAACCTCCTTTATTTAAAGGAAACCGTGTCCAAATTCAGTGT | |
| | ACAGAGGTGCAAACCTCCGCCCCGCTCCTTGTAGGAAGCCCACGGGAACTGG | |
| | GCCAATCGGACGGCGCTTACTCGGCTCATTTACATACCCATAACACACCGCGG | |
| | CTAATGCAAATATTTTCGTGAAAAGATCTTCCATTACTCGAAGTTTTAAAACT | |
| | AAAAACAAAATATTATTTCAAAAGATCATGAAGAAATTTCTGTCGGTAACAG | |
| | CAGTTTCAATTGATAAATCACCATCACTTATCTAGGAGGTTCTGTTACTCTAG | |
| | AAGTGAATTAAGCAGGACAGCTGT | |
| mRnu6- | GGCATGTGATTTTGTTTTGTTTAGGTTTTTTTTTAACTTTATTTGATCAACATGA | 336 |
| Promoter | AATAATACAATAAGCTATGTCTTCTAACCAGCAGGCAGCCAGCCAGGAGCCA | |
| | TGTGTAGCAGTGTTAGAAGCTGCAGCAGGCATGTGGGTAATTGTGGGGAGCT | |
| | TTTAGGAACAGCTAGGGAGCTGTGTGGAGCTGCAGAGATGCAGAGGAGCCTG | |
| | GAGGAACAGACCAGTGCTGTGGGCTGGGAGGAGCCCCCCTCACAGGTACTTG | |
| | CTCAACGGCTCCACGACCATAAGCCTTGAATAAGTTACATGGACATTTTACAA | |
| | ATGGCACAGGATTGATTATGTCTGCTGCCAGAAGCCTCATGTCGATAAGGAG | |
| | AGAGCTGGCCAAAAGGTAAAGTATGCTAGCTCCATACAGTGCAATAGCCACG | |
| | TAGTCTCACAGAGAAAGAGGCAGGCCTGCATCATATCCAAATATGGCCAAGA | |
| | ATTTTATTAAATTAAAATGCAAACAGCA | |
| mRnu7- | TATTTTTAATGAAGCAGGGCCATGGAGCCCAAGCTGGCCTTGAACTTCTCAGC | 337 |
| Promoter | TTTTGTGCTGGTATCACAGAAATGTGGCGCTATGCCCGGTCGGGCCTGATGTT | |
| | CCAGAGTCTTTGCAGTGTGGGGAACTTGTAAGGATGAGACTACAAGACATCG | |
| | GGCCACATCGCCTGCCACTACTTAAGTCCGATTCACTTCGGCTTTAGCTCCAA | |
| | GCCTTTAATCTCGCGAAGCTCTTTTTTTTTTTTTAACAACATAGGAGCTGTGAT | |
| | TGGCTGTTTTCAGCCAATCAGCACTGACTCATTTGCATAGCCTTTACAAGCGG | |
| | TCACAAACTCAAGAAACGAGCGGTTTTAATAGTCTTTTAGAATATTGTTTATC | |
| | GAACCGAATAAGGAACTGTGCTTTGTGATTCACATATCAGTGGAGGGGTGTG | |
| | GAAATGGCACCTTGATCTCACCCTCATCGAAAGTGGAGTTGATGTCCTTCCCT | |
| | GGCTCGCTACAGACGCACTTCCGC | |
| mRnu11- | GTTCTTTGCTTTTACAGACCGTCTCCTGTGTGTCCCTGTCAGAGACCTGAATTC | 338 |
| Promoter | GGTTCCTAGCACCCATATGTTAGAACATAACGTCCAAGTTGGAGGCTACAAGT | |
| | GGCACTAAATTACACATTATCAGTTTTGACAGGTTGGGGCACCGTGTAACCCT | |
| | AGTAACTTAGCGAAAGGCTCCTCGAACCCAACATCCCACCTCTAGCTGGGAG | |
| | CAGCTGTTTTGCACCAGCGCCGCCTACCTCTCCCTCCGCGTCGGCCAGAGCAT | |
| | TCCCAGCAAGCACTGCTCTGATTTGCATATTGACTCACGGACTTTCCTTTACTG | |
| | CTATACAAAAAACGACACAACAGTTCTCTTTGTGAAGAGCTTTCCCTCAGCCC | |
| | GAGAAGAATCGATAGTTTGCCTTTTAGCTTCGACAATATACAGTTGAAAGTTG | |
| | GTTAGACTTTATTTTCACCTTTACCGTAAGATGGGTGGACCGACAATGCCACT | |
| | GTGCTTCCGAACGCGCTCGAGC | |
| mRnu12- | GAAGCAGCGAGGCCCCTACGAGCCTCGAGGAAAAGGGAAAGGGCCGCTCAC | 339 |
| Promoter | CGTCCCTTGGCCGCCGTCCCGCGCTTCCGGATGAGCTCGTCCAGCGAGAGATC | |
| | GGCCATCTTGCGGCGCGCAGCTAGCGGAGAACGGAGGAGAAGCCGACTGCGG | |
| | CGAGCCCGCCCCGCGGCCGGAGTCAAGAGCGGCTTCCGGCAACCCGGACGGC | |
| | CAACTCTCGCGACAGCTCAAACGAAAAGCTCGAGACGGAAGGGGTGGAGCCT | |
| | CTCTCCCCGTGAGCCTTTGCGGTGCTCGCTTCTAATTTGCATGGAGGAGTCCG | |
| | GAGCCTTATGGGCTCTCTCTCCCCCCTCCTCCTTTTGCTAATGAGGAATTAGAA | |
| | TTATATCGATCATAAACCATTAAAAAGCATTATCAAGAGGACAAGTCTTTTAG | |
| | TCATACAGCCGATCGGACACTCACCATACTTGTAATGAGAATATAATTTCTTA | |
| | CCCCTGAGGAACGTAGACACGTTCCTC | |
| mRn7sk- | CGCTTCGGTGTGTCACTTCGGCCACAGAGGGAGACAGACGATTACGGCCCAC | 340 |
| Promoter | GGAAGGCCGCGTGAGTCTCGTGAAGCTGGAGATGCGCTGGGTCTACCTTTCGC | |
| | CGTCCGCTCCGCCTTGGCAGAGGCGCCGACACGCACCGAAGGCAGAGAACCC | |
| | ATCTCGTATGGGACCGCACCGGACACGGGCGCCTGGGCCAGGAGCAGAGCCG | |
| | GGCCGTAGAATAGACATGGCCGTCGGGGGCGGGGCTTCGGAAGGTTTAACCA | |
| | ATCCAAACTGTTGTATTTTGCATAGCCCCAAAGCATTTTGGTTAACAGTAAAA | |
| | ACATCCTAAATTTAAGTATTTTAATTTAAACTTAGAACGAAGCGAGTATAAAA | |
| | AGGATTATTTAACCCTAAAACGGATTCAGGATTTGTTATAATATCAAGTACAG | |
| | TCGGCTACATAAGGTCACCACATGTGTAAAGTTACAAAATTCTATGGCCTTAT | |
| | ATACCTACCAAGAGCCTGCTTACTCTC | |
| Mm U7 3′ | Cccaatttcactggtctacaatgaaagcaaaacagttctcttccccgctccccggtgtgtgagagg | 9 |
| Region | ggctttgatccttctctggtttcctaggaaacgcgtat | |
| Hs U1-1 3′ | ACTTTCTGGAGTTTCAAAAGTAGACTGTACGCTAA | 10 |
| Region (U1 | | |
| terminator) | | |
| hRNU1-1- | ACTTTCTGGAGTTTCAAAAACAGACTGTACGCCAAGGGTCATATCTTTTTTTGT | 341 |
| Terminator | ATTGGTTTGTGTCTTGGTTGGTGTCTTAGGTGTTAATCCTACAGTGGAGGGTTT | |
| | ATGGGAATAGGAAGTAACATGTCGCCTGCATGTCATAGGAGAAAAAGCGAGC | |
| | ATCAGCCGTATCGGCTTTGTAACACAAATTAGCTATCGTGAAGTCCGCTCAGC | |
| | TCTTCCCTTTCTACCCTGGCTGCTTTTTGCAGGGATTGGTCCGTGGTCTCCAGT | |
| | CTCTTGGGTTCTCACCCTGTGTGAAAATCTTCGTGTTTTTCCCTACCCCCCAGT | |
| | CACCTCTTACACAGCCTCTGCTTCCAAGCGCAGCCCCCACAGGAGTTTGTAGG | |
| | ATTTCTGTGCTAGCGGGGAATGTGTTCTCACCTCATAGAGCCAGGTAGAAATT | |
| | ATGCAGATGGGCAGTTCTCTGGGAAGAAAGCAGGGCCTTTGGGGCTCTCAGT | |
| | GTCCCCGTTGGGTTGTAGACA | |
| hRNU1-2- | ACTTTCTGGAGTTTCTAAAAGTAGACTGTACGCTAAGGGTCATATCTTTTTTTG | 342 |
| Terminator | TTTTGGTTTGTGTCTTGGTTGGCGTCTTAAATGTTAATCCTACAGTGGAGGGCT | |
| | GGCGAATAGGAAGTAACATGTCGCCTGCACGCCATAGGAGAAAAAGCGAGC | |
| | ATCAGCCGTATCGGCTTTGTAACACAAATTAGCTATCGTGAAGTCCGCTCAGC | |
| | TCTTCCCTTTCTACCCTGGCTGCTTTTTGCAGGGATTGGTCCGTGGTCTCCAGT | |
| | CTCTTGGGTTCTCACCCTGTGTGAAAATCTTCCTGTTTTTCCCTACCCCCCAAG | |
| | TCACCTCTTACACAGCCTCTGCTTCCAAGCGCAGCCCCCACAGGAGTTTGTAG | |
| | GATTTCTGTGCTAGCGGGGAGTGTGTTCTCACCTCATAGAGCCAGGTAGAAAC | |
| | TACGCAGATGGGTGCTGTTCTCCAGGAAGAAAGCAGGGCCTTTGGGGCTCTC | |
| | AGTGTCCCCGTTGGGTTGTAGA | |
| hRNU1-3- | ACTTTCTGGAGTTTCAAAAACAGACCGTACGCCAAGGGTCATGTCTTTTTTCG | 343 |
| Terminator | TATTGGTTTGTGTCTTAGTTGTTAATCCTACAGTGGAGGCCTGGGGAATAAGA | |
| | AGTAACATGTGGCCTGCACGCCATAGGAGAAAAAGCGAGCATCAGCCGTATC | |
| | GGCTTTGTAACACAAATTAGCTATCGTGAAGTCCGCTCAGCTCTTCCATTTCTA | |
| | CCCTGGCTGCTTTTTGCAGGGATTGGTCCGTGGTCTCCAGTCTCTTGGGTTCTC | |
| | ACCCTGTGTGAAAATCTTCGTGTTTTTCCCTACCCCCCAAGTCACCTCTTACAC | |
| | AGCCTCTGCTTCCAAGCGCAGCCCCCACAGGAGTTTGTAGGATTTCTGTGCTA | |
| | GCGGGGAGTGTGTTCTCACCTCATAGAGCCAGGTAGAAATTATGCAGATGGG | |
| | CGCTGTTCTCTGGGAAGAAAGCAGGGCCTTTGGGGCTCTCAGTGTCCCCGTTG | |
| | GGTTGTAGACATAACACTCTTA | |
| hRNU2-1- | CCTCCGGGGATACAACGTGTTTCCTAAAAGTAGAGGGAGGTAAGAGACGGTA | 344 |
| Terminator | GCACCTGCGGGGCGGCTTGCACGCCGAGTGCCTGTGACGCGCCGGCTTAACTT | |
| | AACTGCTTCCCTGAAGTACCTTGAGGTTCCTGATGTGCGGGCGGTAGACGGTA | |
| | GGCTTATGCGGCACGCTGTCGTTTCCACCGTGGCTACTGCGCTTTGGGAAGGC | |
| | CACGACCTCCTCCTTTGGGGAGGTCCTTAGGATCTCAGCTTGGCAGTCGAGTG | |
| | GGTGGCGACCTTTTAAAGGAATGGGACCCACCCGGAGTTC | |
| hU3- | TTCCCTTCTTGTAATACAAAATAATAACAACCACAGAGGACATCGCAAGTAA | 345 |
| Terminator | AATGTGTATAACAACCCCATCTAAAGAACCCTATCATCTTTCTACTATCTGTCT | |
| | ACCTAAATATGTATAGTATAAATAACCCTATATAGCACTCTAAGCAACTTAAG | |
| | TTAGGTAACTTAGAAAACTCTTTTTTTTTTTTGAGACTGAGTCTCACTCTGTCG | |
| | CACCCAGGCTGGAGTGCAGTGGCGTGATCTCGGCTCACTGCAACCTCCACCTT | |
| | CTGGGTTCAAGTGATTCTCCCATCTCAGTCTCCCAAGTAGCTGGGATTACAGG | |
| | CACGCCACCATGCCCTGCTACATTTTTTTTTTTTTAGTAGAGATGAGGTTTCAC | |
| | CACATTGGCCAGGCTGTTCTCGAACTCCTGACCTCAGGTGATCCGCCCACCTT | |
| | GGCCTCATGAAGTGCTGGGATTACAGGTGTGAGCCACTGTACCCAGCCAGAA | |
| | AACTCTTAAAAAAC | |
| hRNU4-1- | CTGAATTTTCTTGCAGTTGAACAACAGAGGCTTTTTTTGTGTGTGTGGGGGTG | 346 |
| Terminator | CTTGGTTTTGGGAGGTTGAAGAGTACTTGTTCGCAAACTCTCTAAATGAGAGA | |
| | TGGGGAAGTGTCTTACCAGCTGATTCGCGAGAGCACCTGCAAGTTTACCTGTT | |
| | TTAGTGATTTGCGTTTATGAAAGTTGGAGTTGCTGATTTTGTGATCTCTACTTT | |
| | TAAGGTAAAAGCAGGGCGGTGTTGACTTTTCTTGCCAGTTGGCTGTCCTGTTT | |
| | TCTTTCTCGCACTGTTTTCTTTTTGAGACGAAGTCTGTCGCTCAGGCTGGAGTG | |
| | CACTGGCGTGATCTCGGCTCGCTGCAAACTTTGCCGAACCCCTGTTTAGCGAT | |
| | TTCCGTTTG | |
| hRNU5A-1- | ATATGTGGTAATCCAACAATAGAAATTATTTTTAAGTTTGTGTGTTCCTTTTTC | 347 |
| Terminator | TGTTCAATGGTGCTTTTGATATTGTTGTAAAGCAGTGACTAGCAGATTCTGTGT | |
| | GGTAAAAGCACTGAACCCTGTTTAGTTCTTTTCTCCCTACCTTATTGGTAATTA | |
| | TTTCTGTGTATATATGTTCCAAAGAAATGCGGCTTGTATATTCATGCTTTTCAA | |
| | CTTTTTGTGATAGACAGTTGATACACAAGTAGTACCTCCTCCGGGATCTTCTTA | |
| | GTCAAGACTGTTTGGTAGATGCATGTTTTTTGTTACTTGTAATGTACAGTATTC | |
| | AGTTCATTTTCTTTTTGCAGCACTGTCCGGTTGAAACACAACGCGAGGATCGG | |
| | GCGTGGTGGCTCACGCCTGTAATCCCAGCACTTTGGGAGGCCGAGGCAGGAC | |
| | AATCAAGACCAATCCTGGTCATCAAGGCAGGAGAATCAAGACCATCGAGGTC | |
| | AGGAGATCAAGACCATCCT | |
| hRNU6-1- | ACATCAGGTTGTTTTTCTGTTTTTACATCAGGTTGTTTTTCTGTTTGGTTTTTTT | 348 |
| Terminator | TTTACACCACGTTTATACGCCGGTGCACGGTTTACCACTGAAAACACCTTTCA | |
| | TCTACAGGTGATATCTTTTAACACAAATAAAATGTAGTAGTCCTAGGAGACGG | |
| | AATAGAAGGAGGTGGGGCCTAGGCAGATTCATCTCTGCGGTGCATTTTGCCTC | |
| | TGGCCCTCGGGCCCTAGTTTGCGATCTTTCCCATCTTGCCTCTGCTTCCCTCTG | |
| | CACAATCCTGAGTATTGCAGTACCTTACACTTAAGGAAATTTCGTCTTGCCAA | |
| | AGTTGATCCATTTCAGCTCCGAAACATAACAGGAACTAGTGCAACGATAAAC | |
| | GTATGAGGAACTTGCAATAAGAGTGACAGAATCCTTTGAATCAAAAAAAAAA | |
| | AAAGCCACCACTTAATGAGTATCTACCATATGTCAAGGGCTTCACCAATATTT | |
| | CATTGAAATATTCCAGACCA | |
| RNU7-1- | CTTATGATGTTTGTTGCCAATGATAGATTGTTTTCACTGTGCAAAAATTATGGG | 349 |
| Terminator | TAGTTTTGGTGGTCTTGATGCAGTTGTAAGCTTGGGGTATGAAGGTTTGGGCC | |
| | ACGCCTGGGCGCTTCCGGCTGCGCCGGATGCTGTTTCCTTTCCGCTCCCAGGG | |
| | GCGTTGGGAACGGTTGTAGGACGTGGCTCTTTATTCGTGAGTTTTCCATTTACC | |
| | TCCGCTGAACCTAGAGCTTCAGACGCCCTATGGCGTCCGCCTCGACCCAACCG | |
| | GCGGCCTTGAGCGCTGAGCAAGCAAAGGGTGAGAATCGTCCTAGTCAAGGCA | |
| | TAGGCTGCTGGCCTGGGGTAGTCAAGGCATGGGCTGCTGGTCTGGGGAGGAT | |
| | GCGGGCGGAGGATGTGGGGCGACAAACCTGGCTACGTCCGCCGGGAAAATGG | |
| | GGTAGGGGACGCCGGGTACCGTCCTTCTAAGTGGGGCGCTTGCCCCCAAGAC | |
| | TTGGGATCTTATTGGGTTACCTACA | |
| hRNU11- | TCTTTACTGTTATATGTTAGGCGAAATATTACGCGTTTGGAGTAAGTGGTGCTT | 350 |
| Terminator | TTTGTAACTGAAAAGAGATTCTGTGTGTGTTTTTTTTTTTTTAGAGGCTGCATA | |
| | GTTATTTGTATGAACCGCAGGTGACCTAATTAGCAAGGTAATTCAGACCTGTA | |
| | TCCTAGCACTTAAGAAGTGGAAGTGGGATAACCCTGCGTGTTCTCGTGTGGGA | |
| | GGCTAGCTTAAGCAACAAAGCAGGAAGGCCCCACCAACAAAAGAATTTAAAA | |
| | ATTATACGTGCGTGGTGGCGCGCGTATGAGGAAATTATTTGGCAACTGTGTTA | |
| | CAGTATAGCAGCAAATGGAATAGACCTAGTCCCTGACTTTAGGAGACCTGCCT | |
| | CAGCCCCCCGAATGGCTGGGACTACAGGCGTGCGCCTCCGCGCCCAGCTAATT | |
| | TTTGCATTTTTGGTAGAGACGGGTTCACCATGTTGGCCAGGATGGTCTCCATC | |
| | TCTTCATCTGGTGATCCGCC | |
| hRNU12- | ACCTTATTCACGCCTAAAAAGTAGACTGACTGTGGGGTGGTCGTGTTTTTTGT | 351 |
| Terminator | TTCTTGTTGGTAGGTGGTGAATGCGTTTTTTTCGTTGTTTTCTCCGTTACTCAG | |
| | GCTGCCAGTTGCTTGGCAGTCTTGTCGCTGGCTGTGGACGCTCTGCACTTCATC | |
| | ACCGTCCCCAGCTGCGCTTTGAGCCGGTCTAAGGTTGCCCACAGTATTGACGT | |
| | TGGGACCCACGAAACTGGCAATTTCCATGTGTGCGGCCTTACCCAGTTCTCCC | |
| | AAACTTCTGCGTATAACCGCTTCTCTGTGCTTCAGAAAGATAAGTCCGGCCCC | |
| | GGCCTCACACAGCAGCTCAGTTCGTGACAGCGTTTAATATGTAAAATGGAGC | |
| | AAATAATTTATAGGGCGTTGGGAGAGTTAAAGAGACTAATTCATTTACGTGTT | |
| | AAATACAGGGAATGGCTTTTGCATTGATATAACCCCAGCCTCCAGCATGCGCC | |
| | AGACCTGACGTAGGTGTTCGGC | |
| hRN7SK- | TTTGACCCATTACCCATCTAAGTTAGATGCTTTTTTAAATGTTTTTTAATTTTTA | 352 |
| Terminator | AATTTTTAATTTTTTTCATTATTTATTTTTTATTTTTGAGACGGATCTCGGCTCA | |
| | CTGTAACCTCCACCTCCCGGGTTCAAGCGATTCTCCTGACTCAGCCTCCCGAG | |
| | TAGCTGGGATTACAGGCGCGCGCCACCATGCCCGGCTAATTTTTCTATTTTTA | |
| | GTAAAGACGGGGTTTCGCCATGTTGACCAGGGTGGTCTTGAACTCCTGACGTC | |
| | AGGTGATCCTCCTGCCTCGTGCTGGGATTGCAGGCGTGAGCCACCGCTCCCGG | |
| | CCCTTAGATGCTTTTTAATCAGCAAGTACGCAATGCTTTCCTGACAGGAATGT | |
| | CAAGTCCGTCAGGAAATCCACATAAGGGTGTTAAGCAGGCAAAGTACCACAT | |
| | ACAGATTAAAATCAAAAGCACTGTCAACGCTTATTTAATTTATACAGTAGACC | |
| | CTAACTTTTCTAATTTTGTG | |
| mRnu1a1- | GTTTACTTGGTTTTAAAAATAGCTTGCACTAGCGATACCGCGAATATGGTTAT | 353 |
| Terminator | TAGGTTTGTTAGGCACAGTCGTGTCTTACTATAGAAAAATAACGTAGTGTTCA | |
| | TTTTGCTGCCTGTATGTGTTAATTTGTCCTTATTGCGCCATTGTTCTTGTTAAGT | |
| | CTTCTGTAAGGAGTTGCGGGTTTCAAACTGTCAGTCTGAGAGCATAAGCTCAC | |
| | TTTTCAGTCAGTTGAATTGAATGTTACATTCGATTGGTTCTGGATATTGATATT | |
| | ACCCAAGGCTTGTCCTGTTTGTAAGTCTTTTCCTACACCTGACAATATGATTAT | |
| | GTTTACAATGTCCCTAGAACTCTGGGTGTATCGTTCCCACTGAATAAAATTTG | |
| | ATCTCTAAGTTGACCTATAAATTTAAGTACCAAAAAACTGGTTTGTAAGATTT | |
| | TGGAAGGCAGAGGCAGGGAAGAGACCAACGTGGTCTACATATAAAGTACCA | |
| | GGTACATATAAAGTACCAGGT | |
| mRnu1b1- | ATTTTTGTGGTGCTAAAAGTTAGATTGCATTCCGCCCTTCTCACGTCTCTTTAC | 354 |
| Terminator | GTGTTGTTTGCGAGGCGTGGCCTCGGAGGTAAATGGTCTCCTTTTACCTCAGA | |
| | TAAGCTTACCTTTGCTCTGTGAGTAAGAATGTAGCTACACTTCCAAATTTAGC | |
| | TATTGTCCTTTGCGGTCCAAATGAAAATATTACCTTCCGATCTAACAATGTTA | |
| | AACTAGTCCCAGGCCCTTCTATCGATTGCCAGAATAGACTAGACTACTACACA | |
| | GACACACCCTCTCAAATCAGGCCAGCTCCTGCAACCTGCACCTACAGTTTGTC | |
| | CCCTGGGACAAATGAAAGGACAGGCCCTCTTTCCCCCCCCCCCCCAAATCAGA | |
| | GCACACACAGATCTTGGGGTCTGGGGCAGAAATTTCGTTCATGGAAAAAACA | |
| | AACAAACAAACAAACACGATCAAAGGAAGCTCGTTCCCTTTGGCCTCAGGGT | |
| | TTCTTAGACGCCGTGTTCCC | |
| mRnu1b6- | ATAACTGGTAACCAAAAGCAGATTACTTTCCCCCTTGTGGTCTTCGCGTTTGC | 355 |
| Terminator | GGACGGGAGAGAACTTTCGGCCATTTTCCTTTTAGAAATTTAACTTCTTGAAG | |
| | GCCACCAGGTGACCCTTACTTCCCTCTCACCTTTCCTTCTACCTGTACTTTCTCT | |
| | ATTAAAAAGCCTGCAGAAGTACCCTTGACAAATTGCCAAAAATGACACCTAA | |
| | AAAAAAAAAAAGGAAAAACGACACCTTAGGTAATTATAGGTTGTAAGAAAA | |
| | AGATTTGACCTCTTGGAGTTTTTATTTCTTAATACCAAAGGACACCCAAGGAA | |
| | CGTATCTCTCAAAATTGGGTTTCAAACCTCAGCCGTTTCCTTCTTAGTTCCAGT | |
| | GCTTAACACGCAACAGACCTGCACACCACTACACTGCATACGAGTTTTAAAGT | |
| | TAATAAATCAGTCACCCCTCCATAGTCTTCTACCTACTTGAAGACAGAAACGG | |
| | CTGCTAGGAAGCAATTCTTC | |
| mRnu2-10- | CTGGGGAATAAGAGTGGTTTAAAGAAAGAACAATTTGAGAGATCTGCTTAGA | 356 |
| Terminator | TCTAATAAAACCCAAGTATAGTTTCTTTAGACGTCTTATATCTCACGTAGGAC | |
| | CTCTTATTTCAGACTCACTGCAAGAACAAGCTAAAGAACTATATACAGTCAGG | |
| | AACAAGGTGAGCCATCGCGGTTCTCAGTCCCATGATCTTAAGAGTTTTTCCTC | |
| | TTCCCCTCTTCCCTGGCTGTCCTGGAGCTCACTCTGTAGACCAGGCTGGTCTCA | |
| | AACTCAGAAATCCACTTACCTCTGCCTCCCAAGGGCTGGGATTAAAGGCATGC | |
| | ACCACCATTGCCCGGCAGGGTATGTGGACTATGCTGTCCTTCAACTCAGAGAT | |
| | CGTGGTACTTTAAATCTCATTTTCCGAAAGAAAAGAAAAGAAAGGAAGGGGG | |
| | GAAATAAAGCCAGTATATTTTGCACCCACAATCTGAAGTTCTACAAATATTGT | |
| | TAGAAAATGCAAAGGACCCAAGTC | |
| mRnu3b1- | CTCGGTTTATCTTAAAGGGTTTTAAATATAGAAAGCTTCCTTAGTCTTATGGGT | 357 |
| Terminator | GAGAGTGCTGTTTAAGCCTTACCTAGGTATGTCTTTGAACATTTATTACAGATT | |
| | GTTATTTGTGACTATGACCACTCAGGTGTTCTGTTCTTGTGAATTTAGACACAC | |
| | TCAGAAAGGCTACACACTCAAAGACCACACCAAAGTGAAGTACTATCTGGGC | |
| | CGTGAAACTGGTCACATATCAGTTATTTTGCAGTAAAACAAGGAAGTCAATCA | |
| | TACTGCTTCAGTGGGTCAGGGAGTCAAGAATGCACAGTACAAGAGCTGGTGA | |
| | GATTCCTCAGCAGGTAAGAGCACTGAATGCTCTTCCAAAGATTCTGAGTTCAA | |
| | ATCCCAGCAACCACGTGGTGGATTTGAACAAAGGATGAAAACAACCATCCAT | |
| | AACCAGATCTGATGCCCTCTTCTGGAGTGTCAAAAGACAGCTATGGTGTACTT | |
| | ACATAAATAAATAAGTAAAAACA | |
| mRnu5g- | CCACATTTTGTGTTTAAAAATAGAAATATTTAAGTGAGATCAGTTTAAATCTG | 358 |
| Terminator | CTTTATCTAGGGTGTCTAACTGCTTGCATCTTTTTAACTTTTCCTTATTTGTGAG | |
| | AAGGTCTGTAAAACTTATTATATGTTAGTACACTGTAGCTGTCTTCAGACACT | |
| | CCAGAAGAGGGATTCAGATCACCTTACAGATGGTTTTGAGCCACCATGTGGTT | |
| | GCTGGGATTTGAACTCAGGACCTTTAGAAAAGTAGTTGGGTGCTCTTACCCGC | |
| | TGAGCCATCTCACCAGCCCTTTTTTTTTCTTTTTTCCAGTTCGGGTTTCTCTGTG | |
| | TGTAGCCCTGGCTGTCCTGGAACTCATTCTGTAGACCGGGCTGGCCTCGAACT | |
| | CAGAAATCTGCCTGCCTCTGCCTCCCAAGTGCTGGGATTAAAGGAATGTGCCT | |
| | TCATTGCCCGGCTCTAGGGCTTTTTGTTGTTGTTTGTTTGTTTGTTTGTTTGTTT | |
| | GCTTTTGTGGATGGCCT | |
| mRnu6- | AAAACCAGTAAGGGAGAAAGGTCAAGTAACATATAAAGGAAGGCCTATCAG | 359 |
| Terminator | AATTACACCAGACTTTTCACCAGAGACTATGAAAGCCAGAAGAGCCTGGACA | |
| | GATGTTATACAGACACTAAGAGAACACAAATGCCAGCCCAGGCTACTATACC | |
| | TGGCCAAACTCTCAATTACCATAGATGGAGAAACCAAAGTATTCCACGACAA | |
| | AAACAAATTCACACAATATCTTTCCACGAATCCAGCCCTTCAAAGGATAATGA | |
| | CAGAAAAGAAGCAATACAAGGACGGAAATCACGCCCTAGAACAACCAAGAA | |
| | ACTAATCATTCAACAAACCAAAAAGAAGACAGCCACAAGAACAGAATGCCA | |
| | ACTCTAACAACAAAAATAAAAGGAAGCAACAATTACTTTTCCTTAATATCTCT | |
| | TAATATCAATGGACTCAATTCCCCAATAAAAAGACATAGACTAACAGACTGG | |
| | CTACACAAACAGGACCCAACATTCTGCTGCTTA | |
| mRnu7- | CCCAATTTCACTGGTCTACAATGAAAGCAAAACAGTTCTCTTCCCCGCTCCCC | 360 |
| Terminator | GGTGTGTGAGAGGGGCTTTGATCCTTCTCTGGTTTCCTAGGAAACGCGTATGT | |
| | GCTAGAGCCACGCTCTGAGACTTCCGCCTCGTGCGGTCCCGCTTCCTTTCTGCC | |
| | TCCTCTGGCCTGCATCCGTGGGGGAGGTGGCTGGCTGCAGGGTTCTCCGGATC | |
| | TCTTCTGTGTTCCCACTACTCAAGCACCGAGTGGCGTTCTATGGCGTCCGCCTC | |
| | GGCTCAGCCCGCGGCCCTGAGCGCGGAGCAGGCCAAGGGTGAGGAAAGAGC | |
| | CTAGTCTGGGTGTGGGCCGTCTTCTGGGGGGAGGGCGCGATACTATTCTTTGC | |
| | CTCTCCAAGTGGGGCCCTTGCCCATTAGGGCGAAGGGTTGGGAGGACAAGCT | |
| | TATCGGGTTGCTTGCAGGCCTCGGCCCACTAATTCCCTGCCTCTTCCCTCCTCT | |
| | GGGCTCGCCCGCCGTCCTCCGCG | |
| mRnu11- | GAATTTGTTAAATTACAGGAGGAAGCTTTTTTAGTTCATTTTACAAATACTTTC | 361 |
| Terminator | TTGTTAGGTAGATAATACCTTCTAAGGTTATTATCTGGATCTTCTAAGTCTTTT | |
| | TATCGCTAGCAAGTCTAAGTTTCTGGACTTTGGAATTAGAAGTTAATGTCGTA | |
| | GGCGGGCATGGTGGTCCACGCCTTTAATCCCAGAGTTTGGGAGGCAGACGCA | |
| | GGTGGTTTTCTGAGTTCGAGGCCATCCTGCTCTTCAATGTTAGTTCCAGGACA | |
| | GCCAGGGTTATACAAAGAAACCCTGTCTCGAGAAACAAAACAAACAAAAAA | |
| | AGAGTAGCTGAGTGCTCTGAGTTGTCTCTCCAGCCCCTTAGCTATTTATTTTCA | |
| | TTTAAATTATTTTTGTTTTATTCGCTTGTGTGCCTGAGTTTGAATTTCCCGGGAT | |
| | TAACAGTTGAAGACTAGGGCTGGTGAGATGGCTCAGCGGTTAAGATTGCCGA | |
| | CTGCTCTTCCAAAGGTCCTGAG | |
| mRnu12- | ACCCCCTAATTCTACAAGAATAGAAAGCTTAGCAGCTCCTCTGAATGGTTGCT | 362 |
| Terminator | CTCAGGTGCTAGTGGTTGCAAGTCGTATGTTGATGCCTGCCTTTGCCCTACCTG | |
| | GTGTGTGAGCGTGAGCGCGCCCCACCTCTCCAGCCTCTCTCTTACTGTTTTTCA | |
| | GACAAGATGGGACTGTTGTTCTCCTACTGCTATGTACCTCAATTTCAATTGATC | |
| | ATGCCTGGACATAACTGCCCATGTTGTAAGGTCGTCTACGTTGTAAGGTCGTG | |
| | CTCAGTTTCTGATGCCTAGACTAGTCACCTTTCCGTTTGCCTCCTGACTGTGTA | |
| | AATGAGGCAAATGAAGGTGGTCTCTTAACTGACATGTTAGTGTTTGACCTATG | |
| | GGATAGTTTCTCATTGTTGAGACAGAATTTCTAGAAGCTGGTCCGCTGAGCGG | |
| | CTAAGAGCACTTGCTGATATTGCAAAGGATCTACCTGGGTTTGGTTCTCAGCA | |
| | CTCACATGGAAGTTCACAT | |
| mRn7sk- | TGTAGTTCCTGCAATTTAATTTTCGTTTAAAACTTTATTTTATTCTTTAACTTAA | 363 |
| Terminator | AAAAAATATATA | |

TABLE 6

| Sequence | | SEQ |
|---|---|---|
| Name | Sequence | ID NO: |
| Scn2a | ggcctccgcgccgggttttggcgcctcccgcgggcgcccccctcctcacggcgagcgctgccacgtcaga | 364 |
| Luciferase | cgaagggcgcagcgagcgtcctgatccttccgcccggacgctcaggacagcggcccgctgctcataagac | |
| Reporter | tcggccttagaaccccagtatcagcagaaggacattttaggacgggacttgggtgactctagggcactgg | |
| | ttttctttccagagagcggaacaggcgaggaaaagtagtcccttctcggcgattctgcggagggatctcc | |
| | gtggggcggtgaacgccgatgattatataaggacgcgccgggtgtggcacagctagttccgtcgcagccg | |
| | ggatttgggtcgcggttcttgtttgtggatcgctgtgatcgtcacttggtCGGTAAGTTTAGTCTTTTTG | |
| | TCTTTTATTTCAGGTCCCGGATCCGGTGGTGGTGCAAATCAAAGAACTGCTCCTCAGTGGATGTTGCCTT | |
| | TACTTCTAGggtacGCCACCATGGGCACAACTACTGAAACAGAAATAAGAAAGAGACGG | |
| | TCCAGTTCTTATCATGTTTCCATGGATTTATTGGAAGATCCTACATCAAGG | |
| | CAAAGAGCAATGAGTATAGCCAGTATTTTGACCAACACCATGGAAGGTA | |
| | TGTTAAAAGTCCTGCGTCACAGTTACTTGGTGCTTTGGTAATGATGAAAA | |
| | AACACTTCATAAATTTCAATAAAATACTTCCTGACTTGATATTGTATCATT | |
| | ATTACACATTTTACTAAATAACAGTAAAATCCGTGCATAACTCATGGATT | |
| | CTATTATCTTCCACAGAttttttttttttATATTTAGCCTCCAGAAAGCTGCTGCAA | |
| | ATGTAAGGTATATTTTGAACACCACTTTCATACATTAAATTCTAAACATT | |
| | GAAACTTGTGTGCATGACGTTGAAAAGAGTGTAATGATAAATGCTTATAC | |
| | TTATGATGATGCTAAGCCATTTGGATTATATTAACTGCTTGAGACACAAG | |
| | TTATAAAATCCTATGACTTAACCAGAAATATAAATTAAAAATGTGAATTA | |
| | GGGTTTGATATTAACTTCCTTGAAGCAAAGTGTTTAAAATTTTGTAGTCCT | |
| | ACTTTTGCCTTTCTCTGACCAGATTCTTACAATATATCAGCTTTCTCTTTA | |
| | GTTGCAGATTTTATCTGAATAGTTAACATAATGTGTAGCAGTCTGGATCT | |
| | CAGAATGCCaaaataaagactttggggacagcttaatctgtgatcaatttctggctctgccatatgttaa | |
| | atgtgttaatttgtgactttgaatttcagtctcctcatcagtaaaatgtggatgatgatgtttaggcata | |
| | aggttgttgaatggattaaataagccttcttagataaaacactgatgtatttggcatgcagaagacagtt | |
| | aataaatattatcaatattaGTTGTTTTGTTGTTGTTATTTTTGTTAATTCACATGTTTTTGCCTTTCCA | |
| | TACTGTAAGTGAATTCAAACAACTGTCAACTTCAACTACTTGGAAAATATTTTCATGTAAAATGT | |
| | ATTCTATCCCCCTTCCTTGCCCTCCTATTCCCTCCTCTCCCTATCTCTTTAC | |
| | AAACCTTCTCCCTTGTACCCCTTCCCAGGTAtgtgtgtgagtgtgagtgtgtgtagatgtgtC | |
| | AAGGGAGAAGAGAAAAGGAGAATGAAAGCAAAAGAGAGCAAGCATAC | |
| | ACGTCCCTTTCTTATTGATAATTAGATTTTCTCTTGAGATTGGATAGATTC | |
| | CTGGAATAATTCTTTTCCTGTCTGTATGCAAAGATCCCATAATATTATTAA | |
| | TACCAATACGAAAAGCCTGAAAATCACAGCCAGAAAAAATTCACAGTGT | |
| | AGACGACTGTGTACATCACAGACAAGTCAGTATTACAAAACCCAATTTTC | |
| | ATAGTGTCCTATTTCAGTATCCTAATGCAATTCACTGATTTCAATTGAATA | |
| | TTAAACTCTAGTACGTTCTTCCCCAACCTCGCCTGCGTTAGCTTGCACTCC | |
| | CTCTTCCCCCCAGCTGCCAGTAGCTTGCTCCTCCCTGTCCCTCCAGGTAAA | |
| | TCTTTTGAAGATTGTCTGGCCTTCCGCTCCTTGCCATAGCAAAACCACTG | |
| | AGAGGAAGCTGCCAGTGGTTCTGCTACCGATGTCAGCAGCATGTCTGCTC | |
| | CCTAAAGCAGGAAGTAGAGAAGGAGACAGGGTAAGTCTAAATCAACAG | |
| | TCATGCTTTGCACTTCTGATAGCATTAAGTTTGAGCTAAATAAGACATTA | |
| | CTTAAAAAACCTCAAATATCCACAAGATTGGACTTGCCAACTAATTAAGA | |
| | TTTGGAGTTCAAAATAAATGCACCCACACCTTTCTCCATGGAACTATGTG | |
| | ACATGGGGTTGCTTAGGATGGAAAGGATGTTCTAGGAATAAGTGCAATC | |
| | TAGGAAGCTGAAGACTGAGAGTGTTTTCGTTTTATTATCTGCAGAGCTTT | |
| | TGACTTGTGTATTTGTGAGAAATAATGGCCAAGTTTTTATTCTGTTTTTAA | |
| | TCAGTTATCTAGAATGAAAACTGACTTTTCTTTATTCAATTGTATGTAGAC | |
| | ACATTGAGTGTGACATTTGTCAAGGTTGGTTGTTAGCAATATCACATACA | |
| | TGCATACTCAAGCAGACTTAAGATAGTCCtttttttttttttttttttttttGGTTTCTGATA | |
| | ATGGTGCAAAGTTTTCCTGGTTGACATAATCTCTTTTCTTGGGGATCCTTT | |
| | CTTCTATGTCTGATTATTGTTTATTTCACCTTTCCTTTTTATGAACCAGGCT | |
| | TGTTGATCCGGTTGGCAATTTTTGTTCTCCTTCTTTTTAACTACAGCCAAG | |
| | TCTCCGTTGTCCAGGGTAATGGATAGCCTCATGCTTAATGAAGCAGTAGT | |
| | GGATAAGCAAAAATGAACCATTTGCGTTTCAAATTTTTAAAAGTGCAAA | |
| | ATCACATAGAAATGTTTTCTGGTCACACCTTTGTGAAGGATGGTGGGAGG | |
| | GTGAGTTAGAAGCGCCTGAAGAATCAAGGTGAGCCAGCAAAAGACACA | |
| | GATTTACTGTAAGTGATTCTATGTGGATAACCCATGCAGGAATAATGGAG | |
| | ATGTGGCTGCAGTTCTCTCCTGAATGCTTTGCTTTGTTTTAAAGTGTGAGA | |
| | TTCCCCCCttttttttGGAATGAATAATTGAATGATTTTATTTTAGAACTTAAAC | |
| | AACTTTGCTCCGGTTAAGTTGATGAAGAGATTATCTTGCCAAAGGAAGAT | |
| | GGTAGACAGTTTTTCACTTCCTAATTCCCCAAATTTCTTTGCCAATATTCA | |
| | CCAAATTTCAGTATTTTGGGTGTGACCTTAAAGATCTGTGCATTTCTGTCT | |
| | TCTCTCCCAATGTTTGGTTGAAATTCTTCTTGACATCATTGTACATTTTCC | |
| | TTGAATAAATGCATTTTAATATAAAATTTTATGTCATGTTTGATATGAGA | |
| | GttatatatttaaatacatttaaataaatGTTTACCATGAAAATGTATGAATTATATGTATGT | |
| | TTCACCTAAAATCCTTTGTATTTTTCCAGTAATAAATGAGTTCCACTTTGT | |
| | GAAATGTTGATTTGTAACAACAGTGAGGACTCCAGTTCCTTAGGCTGGGG | |
| | TATTTTCTCTTCTTTTATGCCCTCTAGTTAAATGAGAAATGTAGAGAGATG | |
| | GAACTTTGTTGTGTCTAATATGCAAGCCTATAATCTAATAAAATTTAATTT | |
| | GAGACTTTTAAACTGAGATTGGTGACACTGACAAAATTATCTAATTAGAA | |
| | GATCACCAAAACATATCTAATCCAAGAAACTGACATTCAGTGTGACTGAT | |
| | TAAGGTTCTTAGGACATCTCCTGAGATATCTCTGATAACATATATACTTCT | |
| | TGCTCTACCTGGAACATGGATGAGCTTTAAGTGTATGCAATGCAAGTTCT | |
| | ACCCATTAGTTTCTAGCAGCCTTGAAGATAAGTATCAGACAGTTTAGTGT | |
| | TGCCAATAGAATCTTGGAAGCTATGTTTAGCCAGGATACATTTGGAAAGC | |
| | TTACTAGCCTTTCTGTACTGATCCTTTCTATGACAGCAAACCCATTGTAAA | |
| | ATTTTCCCTGTTCCTCCAGCAGATTAACCCATAATATCTTTTAACAACTTT | |
| | AGATTTTTTAAATTCCTTTTAATTTAAACCAAATCTGCTTAATAGAAAGTA | |
| | AGCAGTTTTCATGAGGATTCTAACTTTTTTTCTTCCAGAACTTGAAGAATC | |
| | CAGACAGAAATGCCCACCATGCTGGTATAAATTTGCTAATATGTGTTTGA | |
| | TTTGGGACTGTTGTAAACCATGGTTAAAGGTGAAACACCTTGTCAACCTG | |
| | GTTGTAATGGACCCATTTGTTGACCTGGCCATCACCATCTGCATTGTCTTA | |
| | AATACACTCTTCATGGCTATGGAGCACTATCCCATGACGGAGCAGTTCAG | |
| | CAGTGTACTGTCTGTTGGAAACCTGCTTGGCAGCGGCgagggcagaggcagtctgct | |
| | gacatgcggtgacgtggaagagaatcccggccctCTTAAGCAAAGGAAATCTGGCCGCTCTG | |
| | CTGGGAAGTATGATGTGTATTTGATCTCCGGGatggaagacgccaaaaacataaagaaag | |
| | gcccggcgccattctatccgctggaagatggaaccgctggagagcaactgcataaggctatgaagagata | |
| | cgccctggttcctggaacaattgcttttacagatgcacatatcgaggtggacatcacttacgctgagtac | |
| | ttcgaaatgtccgttcggttggcagaagctatgaaacgatatgggctgaatacaaatcacagaatcgtcg | |
| | tatgcagtgaaaactctcttcaattctttatgccggtgttgggcgcgttatttatcggagttgcagttgc | |
| | gcccgcgaacgacatttataatgaacgtgaattgctcaacagtatgggcatttcgcagcctaccgtggtg | |
| | ttcgtttccaaaaaggggttgcaaaaaattttgaacgtgcaaaaaaagctcccaatcatccaaaaaatta | |
| | ttatcatggattctaaaacggattaccagggatttcagtcgatgtacacgttcgtcacatctcatctacc | |
| | tcccggttttaatgaatacgattttgtgccagagtccttcgatagggacaagacaattgcactgatcatg | |
| | aactcctctggatctactggtctgcctaaaggtgtcgctctgcctcatagaactgcctgcgtgagattct | |
| | cgcatgccagagatcctatttttggcaatcaaatcattccggatactgcgattttaagtgttgttccatt | |
| | ccatcacggttttggaatgtttactacactcggatatttgatatgtggatttcgagtcgtcttaatgtat | |
| | agatttgaagaagagctgtttctgaggagccttcaggattacaagattcaaagtgcgctgctggtgccaa | |
| | ccctattctccttcttcgccaaaagcactctgattgacaaatacgatttatctaatttacacgaaattgc | |
| | ttctggtggcgctcccctctctaaggaagtcggggaagcggttgccaagaggttccatctgccaggtatc | |
| | aggcaaggatatgggctcactgagactacatcagctattctgattacacccgagggggatgataaaccgg | |
| | gcgcggtcggtaaagttgttccattttttgaagcgaaggttgtggatctggataccgggaaaacgctggg | |
| | cgttaatcaaagaggcgaactgtgtgtgagaggtcctatgattatgtccggttatgtaaacaatccggaa | |
| | gcgaccaacgccttgattgacaaggatggatggctacattctggagacatagcttactgggacgaagacg | |
| | aacacttcttcatcgttgaccgcctgaagtctctgattaagtacaaaggctatcaggtggctcccgctga | |
| | attggaatccatcttgctccaacaccccaacatcttcgacgcaggtgtcgcaggtcttcccgacgatgac | |
| | gccggtgaacttcccgccgccgttgttgttttggagcacggaaagacgatgacggaaaaagagatcgtgg | |
| | attacgtcgccagtcaagtaacaaccgcgaaaaagttgcgcggaggagttgtgtttgtggacgaagtacc | |
| | gaaaggtcttaccggaaaactcgacgcaagaaaaatcagagagatcctcataaaggccaagaagggcgga | |
| | aagatcgccgtgtaattctagagtcggggcggccggaattcagatctaccagacatgataagatacattg | |
| | atgagtttggacaaaccacaactagaatgcagtgaaaaaaatgctttatttgtgaaatttgtgatgctat | |
| | tgctttatttGTAACCATTATAAGCTGCAATAAACAAGTT | |

TABLE 7A
Example Fragment Sequences in a Library of Constructs

| Fragment Name | SEQ ID NO: |
|---|---|
| 001_mu1a1_Scn2aF1Scr2_U1 | 365 |
| 002_mu1a1_Scr2_U1 | 366 |
| 003_mu1a1_Scn2aD12_U1 | 367 |
| 004_mu1a1_Scn2aB10_U1 | 368 |
| 005_hRNU1-1_Scn2aB10_hRNU1-1 | 369 |
| 006_hRNU1-1_Scn2aB10_hRNU1-2 | 370 |
| 007_hRNU1-1_Scn2aB10_hRNU1-3 | 371 |
| 008_hRNU1-1_Scn2aB10_hRNU2-1 | 372 |
| 009_hRNU1-1_Scn2aB10_hU3 | 373 |
| 010_hRNU1-1_Scn2aB10_hRNU4-1 | 374 |
| 011_hRNU1-1_Scn2aB10_hRNU5A-1 | 375 |
| 012_hRNU1-1_Scn2aB10_hRNU6-1 | 376 |
| 013_hRNU1-1_Scn2aB10_RNU7-1 | 377 |
| 014_hRNU1-1_Scn2aB10_hRNU11 | 378 |
| 015_hRNU1-1_Scn2aB10_hRNU12 | 379 |
| 016_hRNU1-1_Scn2aB10_hRN7SK | 380 |
| 017_hRNU1-1_Scn2aB10_mRnu1a1 | 381 |
| 018_hRNU1-1_Scn2aB10_mRnu1b1 | 382 |
| 019_hRNU1-1_Scn2aB10_mRnu1b6 | 383 |
| 020_hRNU1-1_Scn2aB10_mRnu2-10 | 384 |
| 021_hRNU1-1_Scn2aB10_mRnu3b1 | 385 |
| 022_hRNU1-1_Scn2aB10_mRnu5g | 386 |
| 023_hRNU1-1_Scn2aB10_mRnu6 | 387 |
| 024_hRNU1-1_Scn2aB10_mRnu7 | 388 |
| 025_hRNU1-1_Scn2aB10_mRnu11 | 389 |
| 026_hRNU1-1_Scn2aB10_mRnu12 | 390 |
| 027_hRNU1-1_Scn2aB10_mRn7sk | 391 |
| 028_hRNU1-2_Scn2aB10_hRNU1-1 | 392 |
| 029_hRNU1-2_Scn2aB10_hRNU1-2 | 393 |
| 030_hRNU1-2_Scn2aB10_hRNU1-3 | 394 |
| 031_hRNU1-2_Scn2aB10_hRNU2-1 | 395 |
| 032_hRNU1-2_Scn2aB10_hU3 | 396 |
| 033_hRNU1-2_Scn2aB10_hRNU4-1 | 397 |
| 034_hRNU1-2_Scn2aB10_hRNU5A-1 | 398 |
| 035_hRNU1-2_Scn2aB10_hRNU6-1 | 399 |
| 036_hRNU1-2_Scn2aB10_RNU7-1 | 400 |
| 037_hRNU1-2_Scn2aB10_hRNU11 | 401 |
| 038_hRNU1-2_Scn2aB10_hRNU12 | 402 |
| 039_hRNU1-2_Scn2aB10_hRN7SK | 403 |
| 040_hRNU1-2_Scn2aB10_mRnu1a1 | 404 |
| 041_hRNU1-2_Scn2aB10_mRnu1b1 | 405 |
| 042_hRNU1-2_Scn2aB10_mRnu1b6 | 406 |
| 043_hRNU1-2_Scn2aB10_mRnu2-10 | 407 |
| 044_hRNU1-2_Scn2aB10_mRnu3b1 | 408 |
| 045_hRNU1-2_Scn2aB10_mRnu5g | 409 |
| 046_hRNU1-2_Scn2aB10_mRnu6 | 410 |
| 047_hRNU1-2_Scn2aB10_mRnu7 | 411 |
| 048_hRNU1-2_Scn2aB10_mRnu11 | 412 |
| 049_hRNU1-2_Scn2aB10_mRnu12 | 413 |
| 050_hRNU1-2_Scn2aB10_mRn7sk | 414 |
| 051_hRNU1-3_Scn2aB10_hRNU1-1 | 415 |
| 052_hRNU1-3_Scn2aB10_hRNU1-2 | 416 |
| 053_hRNU1-3_Scn2aB10_hRNU1-3 | 417 |
| 054_hRNU1-3_Scn2aB10_hRNU2-1 | 418 |
| 055_hRNU1-3_Scn2aB10_hU3 | 419 |
| 056_hRNU1-3_Scn2aB10_hRNU4-1 | 420 |
| 057_hRNU1-3_Scn2aB10_hRNU5A-1 | 421 |
| 058_hRNU1-3_Scn2aB10_hRNU6-1 | 422 |
| 059_hRNU1-3_Scn2aB10_RNU7-1 | 423 |
| 060_hRNU1-3_Scn2aB10_hRNU11 | 424 |
| 061_hRNU1-3_Scn2aB10_hRNU12 | 425 |
| 062_hRNU1-3_Scn2aB10_hRN7SK | 426 |
| 063_hRNU1-3_Scn2aB10_mRnu1a1 | 427 |
| 064_hRNU1-3_Scn2aB10_mRnu1b1 | 428 |
| 065_hRNU1-3_Scn2aB10_mRnu1b6 | 429 |
| 066_hRNU1-3_Scn2aB10_mRnu2-10 | 430 |
| 067_hRNU1-3_Scn2aB10_mRnu3b1 | 431 |
| 068_hRNU1-3_Scn2aB10_mRnu5g | 432 |
| 069_hRNU1-3_Scn2aB10_mRnu6 | 433 |
| 070_hRNU1-3_Scn2aB10_mRnu7 | 434 |
| 071_hRNU1-3_Scn2aB10_mRnu11 | 435 |
| 072_hRNU1-3_Scn2aB10_mRnu12 | 436 |
| 073_hRNU1-3_Scn2aB10_mRn7sk | 437 |
| 074_hRNU2-1_Scn2aB10_hRNU1-1 | 438 |
| 075_hRNU2-1_Scn2aB10_hRNU1-2 | 439 |
| 076_hRNU2-1_Scn2aB10_hRNU1-3 | 440 |
| 077_hRNU2-1_Scn2aB10_hRNU2-1 | 441 |
| 078_hRNU2-1_Scn2aB10_hU3 | 442 |
| 079_hRNU2-1_Scn2aB10_hRNU4-1 | 443 |
| 080_hRNU2-1_Scn2aB10_hRNU5A-1 | 444 |
| 081_hRNU2-1_Scn2aB10_hRNU6-1 | 445 |
| 082_hRNU2-1_Scn2aB10_RNU7-1 | 446 |
| 083_hRNU2-1_Scn2aB10_hRNU11 | 447 |
| 084_hRNU2-1_Scn2aB10_hRNU12 | 448 |
| 085_hRNU2-1_Scn2aB10_hRN7SK | 449 |
| 086_hRNU2-1_Scn2aB10_mRnu1a1 | 450 |
| 087_hRNU2-1_Scn2aB10_mRnu1b1 | 451 |
| 088_hRNU2-1_Scn2aB10_mRnu1b6 | 452 |
| 089_hRNU2-1_Scn2aB10_mRnu2-10 | 453 |
| 090_hRNU2-1_Scn2aB10_mRnu3b1 | 454 |
| 091_hRNU2-1_Scn2aB10_mRnu5g | 455 |
| 092_hRNU2-1_Scn2aB10_mRnu6 | 456 |
| 093_hRNU2-1_Scn2aB10_mRnu7 | 457 |
| 094_hRNU2-1_Scn2aB10_mRnu11 | 458 |
| 095_hRNU2-1_Scn2aB10_mRnu12 | 459 |
| 096_hRNU2-1_Scn2aB10_mRn7sk | 460 |
| 097_mu1a1_Scn2aF1Scr2_U1 | 461 |
| 098_mu1a1_Scr2_U1 | 462 |
| 099_mu1a1_Scn2aD12_U1 | 463 |
| 100_mu1a1_Scn2aB10_U1 | 464 |
| 101_hU3_Scn2aB10_hRNU1-1 | 465 |
| 102_hU3_Scn2aB10_hRNU1-2 | 466 |
| 103_hU3_Scn2aB10_hRNU1-3 | 467 |
| 104_hU3_Scn2aB10_hRNU2-1 | 468 |
| 105_hU3_Scn2aB10_hU3 | 469 |
| 106_hU3_Scn2aB10_hRNU4-1 | 470 |
| 107_hU3_Scn2aB10_hRNU5A-1 | 471 |
| 108_hU3_Scn2aB10_hRNU6-1 | 472 |
| 109_hU3_Scn2aB10_RNU7-1 | 473 |
| 110_hU3_Scn2aB10_hRNU11 | 474 |
| 111_hU3_Scn2aB10_hRNU12 | 475 |
| 112_hU3_Scn2aB10_hRN7SK | 476 |
| 113_hU3_Scn2aB10_mRnu1a1 | 477 |
| 114_hU3_Scn2aB10_mRnu1b1 | 478 |
| 115_hU3_Scn2aB10_mRnu1b6 | 479 |
| 116_hU3_Scn2aB10_mRnu2-10 | 480 |
| 117_hU3_Scn2aB10_mRnu3b1 | 481 |
| 118_hU3_Scn2aB10_mRnu5g | 482 |
| 119_hU3_Scn2aB10_mRnu6 | 483 |
| 120_hU3_Scn2aB10_mRnu7 | 484 |
| 121_hU3_Scn2aB10_mRnu11 | 485 |
| 122_hU3_Scn2aB10_mRnu12 | 486 |
| 123_hU3_Scn2aB10_mRn7sk | 487 |
| 124_hRNU4-1_Scn2aB10_hRNU1-1 | 488 |
| 125_hRNU4-1_Scn2aB10_hRNU1-2 | 489 |
| 126_hRNU4-1_Scn2aB10_hRNU1-3 | 490 |
| 127_hRNU4-1_Scn2aB10_hRNU2-1 | 491 |
| 128_hRNU4-1_Scn2aB10_hU3 | 492 |
| 129_hRNU4-1_Scn2aB10_hRNU4-1 | 493 |
| 130_hRNU4-1_Scn2aB10_hRNU5A-1 | 494 |
| 131_hRNU4-1_Scn2aB10_hRNU6-1 | 495 |
| 132_hRNU4-1_Scn2aB10_RNU7-1 | 496 |
| 133_hRNU4-1_Scn2aB10_hRNU11 | 497 |
| 134_hRNU4-1_Scn2aB10_hRNU12 | 498 |
| 135_hRNU4-1_Scn2aB10_hRN7SK | 499 |
| 136_hRNU4-1_Scn2aB10_mRnu1a1 | 500 |
| 137_hRNU4-1_Scn2aB10_mRnu1b1 | 501 |
| 138_hRNU4-1_Scn2aB10_mRnu1b6 | 502 |
| 139_hRNU4-1_Scn2aB10_mRnu2-10 | 503 |
| 140_hRNU4-1_Scn2aB10_mRnu3b1 | 504 |
| 141_hRNU4-1_Scn2aB10_mRnu5g | 505 |
| 142_hRNU4-1_Scn2aB10_mRnu6 | 506 |
| 143_hRNU4-1_Scn2aB10_mRnu7 | 507 |
| 144_hRNU4-1_Scn2aB10_mRnu11 | 508 |
| 145_hRNU4-1_Scn2aB10_mRnu12 | 509 |
| 146_hRNU4-1_Scn2aB10_mRn7sk | 510 |
| 147_hRNU5A-1_Scn2aB10_hRNU1-1 | 511 |
| 148_hRNU5A-1_Scn2aB10_hRNU1-2 | 512 |
| 149_hRNU5A-1_Scn2aB10_hRNU1-3 | 513 |
| 150_hRNU5A-1_Scn2aB10_hRNU2-1 | 514 |
| 151_hRNU5A-1_Scn2aB10_hU3 | 515 |
| 152_hRNU5A-1_Scn2aB10_hRNU4-1 | 516 |
| 153_hRNU5A-1_Scn2aB10_hRNU5A-1 | 517 |
| 154_hRNU5A-1_Scn2aB10_hRNU6-1 | 518 |
| 155_hRNU5A-1_Scn2aB10_RNU7-1 | 519 |
| 156_hRNU5A-1_Scn2aB10_hRNU11 | 520 |
| 157_hRNU5A-1_Scn2aB10_hRNU12 | 521 |
| 158_hRNU5A-1_Scn2aB10_hRN7SK | 522 |
| 159_hRNU5A-1_Scn2aB10_mRnu1a1 | 523 |
| 160_hRNU5A-1_Scn2aB10_mRnu1b1 | 524 |
| 161_hRNU5A-1_Scn2aB10_mRnu1b6 | 525 |
| 162_hRNU5A-1_Scn2aB10_mRnu2-10 | 526 |
| 163_hRNU5A-1_Scn2aB10_mRnu3b1 | 527 |
| 164_hRNU5A-1_Scn2aB10_mRnu5g | 528 |
| 165_hRNU5A-1_Scn2aB10_mRnu6 | 529 |
| 166_hRNU5A-1_Scn2aB10_mRnu7 | 530 |
| 167_hRNU5A-1_Scn2aB10_mRnu11 | 531 |
| 168_hRNU5A-1_Scn2aB10_mRnu12 | 532 |
| 169_hRNU5A-1_Scn2aB10_mRn7sk | 533 |
| 170_hRNU6-1_Scn2aB10_hRNU1-1 | 534 |
| 171_hRNU6-1_Scn2aB10_hRNU1-2 | 535 |
| 172_hRNU6-1_Scn2aB10_hRNU1-3 | 536 |
| 173_hRNU6-1_Scn2aB10_hRNU2-1 | 537 |
| 174_hRNU6-1_Scn2aB10_hU3 | 538 |
| 175_hRNU6-1_Scn2aB10_hRNU4-1 | 539 |
| 176_hRNU6-1_Scn2aB10_hRNU5A-1 | 540 |
| 177_hRNU6-1_Scn2aB10_hRNU6-1 | 541 |
| 178_hRNU6-1_Scn2aB10_RNU7-1 | 542 |
| 179_hRNU6-1_Scn2aB10_hRNU11 | 543 |
| 180_hRNU6-1_Scn2aB10_hRNU12 | 544 |
| 181_hRNU6-1_Scn2aB10_hRN7SK | 545 |
| 182_hRNU6-1_Scn2aB10_mRnu1a1 | 546 |
| 183_hRNU6-1_Scn2aB10_mRnu1b1 | 547 |
| 184_hRNU6-1_Scn2aB10_mRnu1b6 | 548 |
| 185_hRNU6-1_Scn2aB10_mRnu2-10 | 549 |
| 186_hRNU6-1_Scn2aB10_mRnu3b1 | 550 |
| 187_hRNU6-1_Scn2aB10_mRnu5g | 551 |
| 188_hRNU6-1_Scn2aB10_mRnu6 | 552 |
| 189_hRNU6-1_Scn2aB10_mRnu7 | 553 |
| 190_hRNU6-1_Scn2aB10_mRnu11 | 554 |
| 191_hRNU6-1_Scn2aB10_mRnu12 | 555 |
| 192_hRNU6-1_Scn2aB10_mRn7sk | 556 |
| 193_mu1a1_Scn2aF1Scr2_U1 | 557 |
| 194_mu1a1_Scr2_U1 | 558 |
| 195_mu1a1_Scn2aD12_U1 | 559 |
| 196_mu1a1_Scn2aB10_U1 | 560 |
| 197_RNU7-1_Scn2aB10_hRNU1-1 | 561 |
| 198_RNU7-1_Scn2aB10_hRNU1-2 | 562 |
| 199_RNU7-1_Scn2aB10_hRNU1-3 | 563 |
| 200_RNU7-1_Scn2aB10_hRNU2-1 | 564 |
| 201_RNU7-1_Scn2aB10_hU3 | 565 |
| 202_RNU7-1_Scn2aB10_hRNU4-1 | 566 |
| 203_RNU7-1_Scn2aB10_hRNU5A-1 | 567 |
| 204_RNU7-1_Scn2aB10_hRNU6-1 | 568 |
| 205_RNU7-1_Scn2aB10_RNU7-1 | 569 |
| 206_RNU7-1_Scn2aB10_hRNU11 | 570 |
| 207_RNU7-1_Scn2aB10_hRNU12 | 571 |
| 208_RNU7-1_Scn2aB10_hRN7SK | 572 |
| 209_RNU7-1_Scn2aB10_mRnu1a1 | 573 |
| 210_RNU7-1_Scn2aB10_mRnu1b1 | 574 |
| 211_RNU7-1_Scn2aB10_mRnu1b6 | 575 |
| 212_RNU7-1_Scn2aB10_mRnu2-10 | 576 |
| 213_RNU7-1_Scn2aB10_mRnu3b1 | 577 |
| 214_RNU7-1_Scn2aB10_mRnu5g | 578 |
| 215_RNU7-1_Scn2aB10_mRnu6 | 579 |
| 216_RNU7-1_Scn2aB10_mRnu7 | 580 |
| 217_RNU7-1_Scn2aB10_mRnu11 | 581 |
| 218_RNU7-1_Scn2aB10_mRnu12 | 582 |
| 219_RNU7-1_Scn2aB10_mRn7sk | 583 |
| 220_hRNU11_Scn2aB10_hRNU1-1 | 584 |
| 221_hRNU11_Scn2aB10_hRNU1-2 | 585 |
| 222_hRNU11_Scn2aB10_hRNU1-3 | 586 |
| 223_hRNU11_Scn2aB10_hRNU2-1 | 587 |
| 224_hRNU11_Scn2aB10_hU3 | 588 |
| 225_hRNU11_Scn2aB10_hRNU4-1 | 589 |
| 226_hRNU11_Scn2aB10_hRNU5A-1 | 590 |
| 227_hRNU11_Scn2aB10_hRNU6-1 | 591 |
| 228_hRNU11_Scn2aB10_RNU7-1 | 592 |
| 229_hRNU11_Scn2aB10_hRNU11 | 593 |
| 230_hRNU11_Scn2aB10_hRNU12 | 594 |
| 231_hRNU11_Scn2aB10_hRN7SK | 595 |
| 232_hRNU11_Scn2aB10_mRnu1a1 | 596 |
| 233_hRNU11_Scn2aB10_mRnu1b1 | 597 |
| 234_hRNU11_Scn2aB10_mRnu1b6 | 598 |
| 235_hRNU11_Scn2aB10_mRnu2-10 | 599 |
| 236_hRNU11_Scn2aB10_mRnu3b1 | 600 |
| 237_hRNU11_Scn2aB10_mRnu5g | 601 |
| 238_hRNU11_Scn2aB10_mRnu6 | 602 |
| 239_hRNU11_Scn2aB10_mRnu7 | 603 |
| 240_hRNU11_Scn2aB10_mRnu11 | 604 |
| 241_hRNU11_Scn2aB10_mRnu12 | 605 |
| 242_hRNU11_Scn2aB10_mRn7sk | 606 |
| 243_hRNU12_Scn2aB10_hRNU1-1 | 607 |
| 244_hRNU12_Scn2aB10_hRNU1-2 | 608 |
| 245_hRNU12_Scn2aB10_hRNU1-3 | 609 |
| 246_hRNU12_Scn2aB10_hRNU2-1 | 610 |
| 247_hRNU12_Scn2aB10_hU3 | 611 |
| 248_hRNU12_Scn2aB10_hRNU4-1 | 612 |
| 249_hRNU12_Scn2aB10_hRNU5A-1 | 613 |
| 250_hRNU12_Scn2aB10_hRNU6-1 | 614 |
| 251_hRNU12_Scn2aB10_RNU7-1 | 615 |
| 252_hRNU12_Scn2aB10_hRNU11 | 616 |
| 253_hRNU12_Scn2aB10_hRNU12 | 617 |
| 254_hRNU12_Scn2aB10_hRN7SK | 618 |
| 255_hRNU12_Scn2aB10_mRnu1a1 | 619 |
| 256_hRNU12_Scn2aB10_mRnu1b1 | 620 |
| 257_hRNU12_Scn2aB10_mRnu1b6 | 621 |
| 258_hRNU12_Scn2aB10_mRnu2-10 | 622 |
| 259_hRNU12_Scn2aB10_mRnu3b1 | 623 |
| 260_hRNU12_Scn2aB10_mRnu5g | 624 |
| 261_hRNU12_Scn2aB10_mRnu6 | 625 |
| 262_hRNU12_Scn2aB10_mRnu7 | 626 |
| 263_hRNU12_Scn2aB10_mRnu11 | 627 |
| 264_hRNU12_Scn2aB10_mRnu12 | 628 |
| 265_hRNU12_Scn2aB10_mRn7sk | 629 |
| 266_hRN7SK_Scn2aB10_hRNU1-1 | 630 |
| 267_hRN7SK_Scn2aB10_hRNU1-2 | 631 |
| 268_hRN7SK_Scn2aB10_hRNU1-3 | 632 |
| 269_hRN7SK_Scn2aB10_hRNU2-1 | 633 |
| 270_hRN7SK_Scn2aB10_hU3 | 634 |
| 271_hRN7SK_Scn2aB10_hRNU4-1 | 635 |
| 272_hRN7SK_Scn2aB10_hRNU5A-1 | 636 |
| 273_hRN7SK_Scn2aB10_hRNU6-1 | 637 |
| 274_hRN7SK_Scn2aB10_RNU7-1 | 638 |
| 275_hRN7SK_Scn2aB10_hRNU11 | 639 |
| 276_hRN7SK_Scn2aB10_hRNU12 | 640 |
| 277_hRN7SK_Scn2aB10_hRN7SK | 641 |
| 278_hRN7SK_Scn2aB10_mRnu1a1 | 642 |
| 279_hRN7SK_Scn2aB10_mRnu1b1 | 643 |
| 280_hRN7SK_Scn2aB10_mRnu1b6 | 644 |
| 281_hRN7SK_Scn2aB10_mRnu2-10 | 645 |
| 282_hRN7SK_Scn2aB10_mRnu3b1 | 646 |
| 283_hRN7SK_Scn2aB10_mRnu5g | 647 |
| 284_hRN7SK_Scn2aB10_mRnu6 | 648 |
| 285_hRN7SK_Scn2aB10_mRnu7 | 649 |
| 286_hRN7SK_Scn2aB10_mRnu11 | 650 |
| 287_hRN7SK_Scn2aB10_mRnu12 | 651 |
| 288_hRN7SK_Scn2aB10_mRn7sk | 652 |
| 289_mu1a1_Scn2aF1Scr2_U1 | 653 |
| 290_mu1a1_Scr2_U1 | 654 |
| 291_mu1a1_Scn2aD12_U1 | 655 |
| 292_mu1a1_Scn2aB10_U1 | 656 |
| 293_mRnu1a1_Scn2aB10_hRNU1-1 | 657 |
| 294_mRnu1a1_Scn2aB10_hRNU1-2 | 658 |
| 295_mRnu1a1_Scn2aB10_hRNU1-3 | 659 |
| 296_mRnu1a1_Scn2aB10_hRNU2-1 | 660 |
| 297_mRnu1a1_Scn2aB10_hU3 | 661 |
| 298_mRnu1a1_Scn2aB10_hRNU4-1 | 662 |
| 299_mRnu1a1_Scn2aB10_hRNU5A-1 | 663 |
| 300_mRnu1a1_Scn2aB10_hRNU6-1 | 664 |
| 301_mRnu1a1_Scn2aB10_RNU7-1 | 665 |
| 302_mRnu1a1_Scn2aB10_hRNU11 | 666 |
| 303_mRnu1a1_Scn2aB10_hRNU12 | 667 |
| 304_mRnu1a1_Scn2aB10_hRN7SK | 668 |
| 305_mRnu1a1_Scn2aB10_mRnu1a1 | 669 |
| 306_mRnu1a1_Scn2aB10_mRnu1b1 | 670 |
| 307_mRnu1a1_Scn2aB10_mRnu1b6 | 671 |
| 308_mRnu1a1_Scn2aB10_mRnu2-10 | 672 |
| 309_mRnu1a1_Scn2aB10_mRnu3b1 | 673 |
| 310_mRnu1a1_Scn2aB10_mRnu5g | 674 |
| 311_mRnu1a1_Scn2aB10_mRnu6 | 675 |
| 312_mRnu1a1_Scn2aB10_mRnu7 | 676 |
| 313_mRnu1a1_Scn2aB10_mRnu11 | 677 |
| 314_mRnu1a1_Scn2aB10_mRnu12 | 678 |
| 315_mRnu1a1_Scn2aB10_mRn7sk | 679 |
| 316_mRnu1b1_Scn2aB10_hRNU1-1 | 680 |
| 317_mRnu1b1_Scn2aB10_hRNU1-2 | 681 |
| 318_mRnu1b1_Scn2aB10_hRNU1-3 | 682 |
| 319_mRnu1b1_Scn2aB10_hRNU2-1 | 683 |
| 320_mRnu1b1_Scn2aB10_hU3 | 684 |
| 321_mRnu1b1_Scn2aB10_hRNU4-1 | 685 |
| 322_mRnu1b1_Scn2aB10_hRNU5A-1 | 686 |
| 323_mRnu1b1_Scn2aB10_hRNU6-1 | 687 |
| 324_mRnu1b1_Scn2aB10_RNU7-1 | 688 |
| 325_mRnu1b1_Scn2aB10_hRNU11 | 689 |
| 326_mRnu1b1_Scn2aB10_hRNU12 | 690 |
| 327_mRnu1b1_Scn2aB10_hRN7SK | 691 |
| 328_mRnu1b1_Scn2aB10_mRnu1a1 | 692 |
| 329_mRnu1b1_Scn2aB10_mRnu1b1 | 693 |
| 330_mRnu1b1_Scn2aB10_mRnu1b6 | 694 |
| 331_mRnu1b1_Scn2aB10_mRnu2-10 | 695 |
| 332_mRnu1b1_Scn2aB10_mRnu3b1 | 696 |
| 333_mRnu1b1_Scn2aB10_mRnu5g | 697 |
| 334_mRnu1b1_Scn2aB10_mRnu6 | 698 |
| 335_mRnu1b1_Scn2aB10_mRnu7 | 699 |
| 336_mRnu1b1_Scn2aB10_mRnu11 | 700 |
| 337_mRnu1b1_Scn2aB10_mRnu12 | 701 |
| 338_mRnu1b1_Scn2aB10_mRn7sk | 702 |
| 339_mRnu1b6_Scn2aB10_hRNU1-1 | 703 |
| 340_mRnu1b6_Scn2aB10_hRNU1-2 | 704 |
| 341_mRnu1b6_Scn2aB10_hRNU1-3 | 705 |
| 342_mRnu1b6_Scn2aB10_hRNU2-1 | 706 |
| 343_mRnu1b6_Scn2aB10_hU3 | 707 |
| 344_mRnu1b6_Scn2aB10_hRNU4-1 | 708 |
| 345_mRnu1b6_Scn2aB10_hRNU5A-1 | 709 |
| 346_mRnu1b6_Scn2aB10_hRNU6-1 | 710 |
| 347_mRnu1b6_Scn2aB10_RNU7-1 | 711 |
| 348_mRnu1b6_Scn2aB10_hRNU11 | 712 |
| 349_mRnu1b6_Scn2aB10_hRNU12 | 713 |
| 350_mRnu1b6_Scn2aB10_hRN7SK | 714 |
| 351_mRnu1b6_Scn2aB10_mRnu1a1 | 715 |
| 352_mRnu1b6_Scn2aB10_mRnu1b1 | 716 |
| 353_mRnu1b6_Scn2aB10_mRnu1b6 | 717 |
| 354_mRnu1b6_Scn2aB10_mRnu2-10 | 718 |
| 355_mRnu1b6_Scn2aB10_mRnu3b1 | 719 |
| 356_mRnu1b6_Scn2aB10_mRnu5g | 720 |
| 357_mRnu1b6_Scn2aB10_mRnu6 | 721 |
| 358_mRnu1b6_Scn2aB10_mRnu7 | 722 |
| 359_mRnu1b6_Scn2aB10_mRnu11 | 723 |
| 360_mRnu1b6_Scn2aB10_mRnu12 | 724 |
| 361_mRnu1b6_Scn2aB10_mRn7sk | 725 |
| 362_mRnu2-10_Scn2aB10_hRNU1-1 | 726 |
| 363_mRnu2-10_Scn2aB10_hRNU1-2 | 727 |
| 364_mRnu2-10_Scn2aB10_hRNU1-3 | 728 |
| 365_mRnu2-10_Scn2aB10_hRNU2-1 | 729 |
| 366_mRnu2-10_Scn2aB10_hU3 | 730 |
| 367_mRnu2-10_Scn2aB10_hRNU4-1 | 731 |
| 368_mRnu2-10_Scn2aB10_hRNU5A-1 | 732 |
| 369_mRnu2-10_Scn2aB10_hRNU6-1 | 733 |
| 370_mRnu2-10_Scn2aB10_RNU7-1 | 734 |
| 371_mRnu2-10_Scn2aB10_hRNU11 | 735 |
| 372_mRnu2-10_Scn2aB10_hRNU12 | 736 |
| 373_mRnu2-10_Scn2aB10_hRN7SK | 737 |
| 374_mRnu2-10_Scn2aB10_mRnu1a1 | 738 |
| 375_mRnu2-10_Scn2aB10_mRnu1b1 | 739 |
| 376_mRnu2-10_Scn2aB10_mRnu1b6 | 740 |
| 377_mRnu2-10_Scn2aB10_mRnu2-10 | 741 |
| 378_mRnu2-10_Scn2aB10_mRnu3b1 | 742 |
| 379_mRnu2-10_Scn2aB10_mRnu5g | 743 |
| 380_mRnu2-10_Scn2aB10_mRnu6 | 744 |
| 381_mRnu2-10_Scn2aB10_mRnu7 | 745 |
| 382_mRnu2-10_Scn2aB10_mRnu11 | 746 |
| 383_mRnu2-10_Scn2aB10_mRnu12 | 747 |
| 384_mRnu2-10_Scn2aB10_mRn7sk | 748 |
| 385_mu1a1_Scn2aF1Scr2_U1 | 749 |
| 386_mu1a1_Scr2_U1 | 750 |
| 387_mu1a1_Scn2aD12_U1 | 751 |
| 388_mu1a1_Scn2aB10_U1 | 752 |
| 389_mRnu3b1_Scn2aB10_hRNU1-1 | 753 |
| 390_mRnu3b1_Scn2aB10_hRNU1-2 | 754 |
| 391_mRnu3b1_Scn2aB10_hRNU1-3 | 755 |
| 392_mRnu3b1_Scn2aB10_hRNU2-1 | 756 |
| 393_mRnu3b1_Scn2aB10_hU3 | 757 |
| 394_mRnu3b1_Scn2aB10_hRNU4-1 | 758 |
| 395_mRnu3b1_Scn2aB10_hRNU5A-1 | 759 |
| 396_mRnu3b1_Scn2aB10_hRNU6-1 | 760 |
| 397_mRnu3b1_Scn2aB10_RNU7-1 | 761 |
| 398_mRnu3b1_Scn2aB10_hRNU11 | 762 |
| 399_mRnu3b1_Scn2aB10_hRNU12 | 763 |
| 400_mRnu3b1_Scn2aB10_hRN7SK | 764 |
| 401_mRnu3b1_Scn2aB10_mRnu1a1 | 765 |
| 402_mRnu3b1_Scn2aB10_mRnu1b1 | 766 |
| 403_mRnu3b1_Scn2aB10_mRnu1b6 | 767 |
| 404_mRnu3b1_Scn2aB10_mRnu2-10 | 768 |
| 405_mRnu3b1_Scn2aB10_mRnu3b1 | 769 |
| 406_mRnu3b1_Scn2aB10_mRnu5g | 770 |
| 407_mRnu3b1_Scn2aB10_mRnu6 | 771 |
| 408_mRnu3b1_Scn2aB10_mRnu7 | 772 |
| 409_mRnu3b1_Scn2aB10_mRnu11 | 773 |
| 410_mRnu3b1_Scn2aB10_mRnu12 | 774 |
| 411_mRnu3b1_Scn2aB10_mRn7sk | 775 |
| 412_mRnu5g_Scn2aB10_hRNU1-1 | 776 |
| 413_mRnu5g_Scn2aB10_hRNU1-2 | 777 |
| 414_mRnu5g_Scn2aB10_hRNU1-3 | 778 |
| 415_mRnu5g_Scn2aB10_hRNU2-1 | 779 |
| 416_mRnu5g_Scn2aB10_hU3 | 780 |
| 417_mRnu5g_Scn2aB10_hRNU4-1 | 781 |
| 418_mRnu5g_Scn2aB10_hRNU5A-1 | 782 |
| 419_mRnu5g_Scn2aB10_hRNU6-1 | 783 |
| 420_mRnu5g_Scn2aB10_RNU7-1 | 784 |
| 421_mRnu5g_Scn2aB10_hRNU11 | 785 |
| 422_mRnu5g_Scn2aB10_hRNU12 | 786 |
| 423_mRnu5g_Scn2aB10_hRN7SK | 787 |
| 424_mRnu5g_Scn2aB10_mRnu1a1 | 788 |
| 425_mRnu5g_Scn2aB10_mRnu1b1 | 789 |
| 426_mRnu5g_Scn2aB10_mRnu1b6 | 790 |
| 427_mRnu5g_Scn2aB10_mRnu2-10 | 791 |
| 428_mRnu5g_Scn2aB10_mRnu3b1 | 792 |
| 429_mRnu5g_Scn2aB10_mRnu5g | 793 |
| 430_mRnu5g_Scn2aB10_mRnu6 | 794 |
| 431_mRnu5g_Scn2aB10_mRnu7 | 795 |
| 432_mRnu5g_Scn2aB10_mRnu11 | 796 |
| 433_mRnu5g_Scn2aB10_mRnu12 | 797 |
| 434_mRnu5g_Scn2aB10_mRn7sk | 798 |
| 435_mRnu6_Scn2aB10_hRNU1-1 | 799 |
| 436_mRnu6_Scn2aB10_hRNU1-2 | 800 |
| 437_mRnu6_Scn2aB10_hRNU1-3 | 801 |
| 438_mRnu6_Scn2aB10_hRNU2-1 | 802 |
| 439_mRnu6_Scn2aB10_hU3 | 803 |
| 440_mRnu6_Scn2aB10_hRNU4-1 | 804 |
| 441_mRnu6_Scn2aB10_hRNU5A-1 | 805 |
| 442_mRnu6_Scn2aB10_hRNU6-1 | 806 |
| 443_mRnu6_Scn2aB10_RNU7-1 | 807 |
| 444_mRnu6_Scn2aB10_hRNU11 | 808 |
| 445_mRnu6_Scn2aB10_hRNU12 | 809 |
| 446_mRnu6_Scn2aB10_hRN7SK | 810 |
| 447_mRnu6_Scn2aB10_mRnu1a1 | 811 |
| 448_mRnu6_Scn2aB10_mRnu1b1 | 812 |
| 449_mRnu6_Scn2aB10_mRnu1b6 | 813 |
| 450_mRnu6_Scn2aB10_mRnu2-10 | 814 |
| 451_mRnu6_Scn2aB10_mRnu3b1 | 815 |
| 452_mRnu6_Scn2aB10_mRnu5g | 816 |
| 453_mRnu6_Scn2aB10_mRnu6 | 817 |
| 454_mRnu6_Scn2aB10_mRnu7 | 818 |
| 455_mRnu6_Scn2aB10_mRnu11 | 819 |
| 456_mRnu6_Scn2aB10_mRnu12 | 820 |
| 457_mRnu6_Scn2aB10_mRn7sk | 821 |
| 458_mRnu7_Scn2aB10_hRNU1-1 | 822 |
| 459_mRnu7_Scn2aB10_hRNU1-2 | 823 |
| 460_mRnu7_Scn2aB10_hRNU1-3 | 824 |
| 461_mRnu7_Scn2aB10_hRNU2-1 | 825 |
| 462_mRnu7_Scn2aB10_hU3 | 826 |
| 463_mRnu7_Scn2aB10_hRNU4-1 | 827 |
| 464_mRnu7_Scn2aB10_hRNU5A-1 | 828 |
| 465_mRnu7_Scn2aB10_hRNU6-1 | 829 |
| 466_mRnu7_Scn2aB10_RNU7-1 | 830 |
| 467_mRnu7_Scn2aB10_hRNU11 | 831 |
| 468_mRnu7_Scn2aB10_hRNU12 | 832 |
| 469_mRnu7_Scn2aB10_hRN7SK | 833 |
| 470_mRnu7_Scn2aB10_mRnu1a1 | 834 |
| 471_mRnu7_Scn2aB10_mRnu1b1 | 835 |
| 472_mRnu7_Scn2aB10_mRnu1b6 | 836 |
| 473_mRnu7_Scn2aB10_mRnu2-10 | 837 |
| 474_mRnu7_Scn2aB10_mRnu3b1 | 838 |
| 475_mRnu7_Scn2aB10_mRnu5g | 839 |
| 476_mRnu7_Scn2aB10_mRnu6 | 840 |
| 477_mRnu7_Scn2aB10_mRnu7 | 841 |
| 478_mRnu7_Scn2aB10_mRnu11 | 842 |
| 479_mRnu7_Scn2aB10_mRnu12 | 843 |
| 480_mRnu7_Scn2aB10_mRn7sk | 844 |
| 481_mu1a1_Scn2aF1Scr2_U1 | 845 |
| 482_mu1a1_Scr2_U1 | 846 |
| 483_mu1a1_Scn2aD12_U1 | 847 |
| 484_mu1a1_Scn2aB10_U1 | 848 |
| 485_mRnu11_Scn2aB10_hRNU1-1 | 849 |
| 486_mRnu11_Scn2aB10_hRNU1-2 | 850 |
| 487_mRnu11_Scn2aB10_hRNU1-3 | 851 |
| 488_mRnu11_Scn2aB10_hRNU2-1 | 852 |
| 489_mRnu11_Scn2aB10_hU3 | 853 |
| 490_mRnu11_Scn2aB10_hRNU4-1 | 854 |
| 491_mRnu11_Scn2aB10_hRNU5A-1 | 855 |
| 492_mRnu11_Scn2aB10_hRNU6-1 | 856 |
| 493_mRnu11_Scn2aB10_RNU7-1 | 857 |
| 494_mRnu11_Scn2aB10_hRNU11 | 858 |
| 495_mRnu11_Scn2aB10_hRNU12 | 859 |
| 496_mRnu11_Scn2aB10_hRN7SK | 860 |
| 497_mRnu11_Scn2aB10_mRnu1a1 | 861 |
| 498_mRnu11_Scn2aB10_mRnu1b1 | 862 |
| 499_mRnu11_Scn2aB10_mRnu1b6 | 863 |
| 500_mRnu11_Scn2aB10_mRnu2-10 | 864 |
| 501_mRnu11_Scn2aB10_mRnu3b1 | 865 |
| 502_mRnu11_Scn2aB10_mRnu5g | 866 |
| 503_mRnu11_Scn2aB10_mRnu6 | 867 |
| 504_mRnu11_Scn2aB10_mRnu7 | 868 |
| 505_mRnu11_Scn2aB10_mRnu11 | 869 |
| 506_mRnu11_Scn2aB10_mRnu12 | 870 |
| 507_mRnu11_Scn2aB10_mRn7sk | 871 |
| 508_mRnu12_Scn2aB10_hRNU1-1 | 872 |
| 509_mRnu12_Scn2aB10_hRNU1-2 | 873 |
| 510_mRnu12_Scn2aB10_hRNU1-3 | 874 |
| 511_mRnu12_Scn2aB10_hRNU2-1 | 875 |
| 512_mRnu12_Scn2aB10_hU3 | 876 |
| 513_mRnu12_Scn2aB10_hRNU4-1 | 877 |
| 514_mRnu12_Scn2aB10_hRNU5A-1 | 878 |
| 515_mRnu12_Scn2aB10_hRNU6-1 | 879 |
| 516_mRnu12_Scn2aB10_RNU7-1 | 880 |
| 517_mRnu12_Scn2aB10_hRNU11 | 881 |
| 518_mRnu12_Scn2aB10_hRNU12 | 882 |
| 519_mRnu12_Scn2aB10_hRN7SK | 883 |
| 520_mRnu12_Scn2aB10_mRnu1a1 | 884 |
| 521_mRnu12_Scn2aB10_mRnu1b1 | 885 |
| 522_mRnu12_Scn2aB10_mRnu1b6 | 886 |
| 523_mRnu12_Scn2aB10_mRnu2-10 | 887 |
| 524_mRnu12_Scn2aB10_mRnu3b1 | 888 |
| 525_mRnu12_Scn2aB10_mRnu5g | 889 |
| 526_mRnu12_Scn2aB10_mRnu6 | 890 |
| 527_mRnu12_Scn2aB10_mRnu7 | 891 |
| 528_mRnu12_Scn2aB10_mRnu11 | 892 |
| 529_mRnu12_Scn2aB10_mRnu12 | 893 |
| 530_mRnu12_Scn2aB10_mRn7sk | 894 |
| 531_mRn7sk_Scn2aB10_hRNU1-1 | 895 |
| 532_mRn7sk_Scn2aB10_hRNU1-2 | 896 |
| 533_mRn7sk_Scn2aB10_hRNU1-3 | 897 |
| 534_mRn7sk_Scn2aB10_hRNU2-1 | 898 |
| 535_mRn7sk_Scn2aB10_hU3 | 899 |
| 536_mRn7sk_Scn2aB10_hRNU4-1 | 900 |
| 537_mRn7sk_Scn2aB10_hRNU5A-1 | 901 |
| 538_mRn7sk_Scn2aB10_hRNU6-1 | 902 |
| 539_mRn7sk_Scn2aB10_RNU7-1 | 903 |
| 540_mRn7sk_Scn2aB10_hRNU11 | 904 |
| 541_mRn7sk_Scn2aB10_hRNU12 | 905 |
| 542_mRn7sk_Scn2aB10_hRN7SK | 906 |
| 543_mRn7sk_Scn2aB10_mRnu1a1 | 907 |
| 544_mRn7sk_Scn2aB10_mRnu1b1 | 908 |
| 545_mRn7sk_Scn2aB10_mRnu1b6 | 909 |
| 546_mRn7sk_Scn2aB10_mRnu2-10 | 910 |
| 547_mRn7sk_Scn2aB10_mRnu3b1 | 911 |
| 548_mRn7sk_Scn2aB10_mRnu5g | 912 |
| 549_mRn7sk_Scn2aB10_mRnu6 | 913 |
| 550_mRn7sk_Scn2aB10_mRnu7 | 914 |
| 551_mRn7sk_Scn2aB10_mRnu11 | 915 |
| 552_mRn7sk_Scn2aB10_mRnu12 | 916 |
| 553_mRn7sk_Scn2aB10_mRn7sk | 917 |

TABLE 7B
Example U7 Core Sequences included in a library of constructs

| | | SEQ ID |
|---|---|---|
| U7 Core Name | U7 Core Sequence | NO: |
| Scn2aF1Scr2 | aATGATAGGGACTTAGGGTGAGAAATATTCCTCTAACATTCTACAAATT | 919 |
| | TTTGGAGcaggttttctgacttcggtcggaaaacccct | |
| Scr2 | aATGATAGGGACTTAGGGTGAGATAATGGTCACAGGCGGAAGGGATCG | 920 |
| | AATCAGAGTCATGCGGAGGTGTAAATTTTTGGAGcaggttttctgacttcggtcggaa | |
| | aacccct | |
| Scn2aD12 | aATGATAGGGACTTAGGGTGAACATTACTTTGAACTTAACACTACTAG | 921 |
| | AAGAATTTTTGGAGcaggttttctgacttcggtcggaaaacccct | |
| Scn2aB10 | aATGATAGGGACTTAGGGTGATAGAAGTGCAAAGCATGACTGTCAAAT | 922 |
| | TTTTGGAGcaggttttctgacttcggtcggaaaacccct | |

TABLE 8
Library 1 Summary

| | | | | | Rep | Rep | Rep | | | ANOVA |
|---|---|---|---|---|---|---|---|---|---|---|
| Name | ID | Promoter | U7 | Terminator | 1 | 2 | 3 | Average | SD | P-value |
| 054_hRNU1- | 054 | hRNU1-3 | Scn2aB10 | hRNU2-1 | 0.64 | 0.43 | 0.25 | 0.44 | 0.19 | 0.007 |
| 3_Scn2aB10_{—} | | | | | | | | | | |
| hRNU2-1 | | | | | | | | | | |
| 043_hRNU1- | 043 | hRNU1-2 | Scn2aB10 | mRnu2-10 | 0.72 | 0.76 | 0.83 | 0.77 | 0.06 | 0.25 |
| 2_Scn2aB10_{—} | | | | | | | | | | |
| mRnu2-10 | | | | | | | | | | |
| 033_hRNU1- | 033 | hRNU1-2 | Scn2aB10 | hRNU4-1 | 0.53 | 0.90 | 1.03 | 0.82 | 0.26 | 0.35 |
| 2_Scn2aB10_{—} | | | | | | | | | | |
| hRNU4-1 | | | | | | | | | | |
| 073_hRNU1- | 073 | hRNU1-3 | Scn2aB10 | mRn7sk | 0.88 | 0.88 | 0.86 | 0.87 | 0.01 | 0.50 |
| 3_Scn2aB10_{—} | | | | | | | | | | |
| mRn7sk | | | | | | | | | | |
| 044_hRNU1- | 044 | hRNU1-2 | Scn2aB10 | mRnu3b1 | 0.88 | 0.92 | 0.91 | 0.90 | 0.02 | 0.59 |
| 2_Scn2aB10_{—} | | | | | | | | | | |
| mRnu3b1 | | | | | | | | | | |
| 097_mu1a1_{—} | 097 | mu1a1 | Scn2aF1Scr2 | U1 | 0.93 | 1.07 | 0.80 | 0.93 | 0.14 | 0.69 |
| Scn2aF1Scr2_{—} | | | | | | | | | | |
| U1 | | | | | | | | | | |
| 048_hRNU1- | 048 | hRNU1-2 | Scn2aB10 | mRnu11 | 0.82 | 1.03 | 1.07 | 0.97 | 0.13 | 0.84 |
| 2_Scn2aB10_{—} | | | | | | | | | | |
| mRnu11 | | | | | | | | | | |
| 002_mu1a1_{—} | 002 | mu1a1 | Scr2 | U1 | 1.15 | 0.81 | 0.96 | 0.97 | 0.17 | 0.84 |
| Scr2_U1 | | | | | | | | | | |
| 039_hRNU1- | 039 | hRNU1-2 | Scn2aB10 | hRN7SK | 1.31 | 1.10 | 0.59 | 1.00 | 0.37 | 0.94 |
| 2_Scn2aB10_{—} | | | | | | | | | | |
| hRN7SK | | | | | | | | | | |
| 098_mu1a1_{—} | 098 | mu1a1 | Scr2 | U1 | 1.10 | 1.02 | 0.93 | 1.02 | 0.09 | Control |
| Scr2_U1 | | | | | | | | | | |
| 050_hRNU1- | 050 | hRNU1-2 | Scn2aB10 | mRn7sk | 1.16 | 1.13 | 0.86 | 1.05 | 0.17 | 0.88 |
| 2_Scn2aB10_{—} | | | | | | | | | | |
| mRn7sk | | | | | | | | | | |
| 021_hRNU1- | 021 | hRNU1-1 | Scn2aB10 | mRnu3b1 | 0.97 | 1.08 | 1.10 | 1.05 | 0.07 | 0.88 |
| 1_Scn2aB10_{—} | | | | | | | | | | |
| mRnu3b1 | | | | | | | | | | |
| 090_hRNU2- | 090 | hRNU2-1 | Scn2aB10 | mRnu3b1 | 1.08 | 0.82 | 1.26 | 1.05 | 0.23 | 0.86 |
| 1_Scn2aB10_{—} | | | | | | | | | | |
| mRnu3b1 | | | | | | | | | | |
| 085_hRNU2- | 085 | hRNU2-1 | Scn2aB10 | hRN7SK | 1.03 | 0.84 | 1.34 | 1.07 | 0.25 | 0.80 |
| 1_Scn2aB10_{—} | | | | | | | | | | |
| hRN7SK | | | | | | | | | | |
| 016_hRNU1- | 016 | hRNU1-1 | Scn2aB10 | hRN7SK | 0.82 | 1.00 | 1.39 | 1.07 | 0.29 | 0.80 |
| 1_Scn2aB10_{—} | | | | | | | | | | |
| hRN7SK | | | | | | | | | | |
| 001_mu1a1_{—} | 001 | mu1a1 | Scn2aF1Scr2 | U1 | 0.82 | 1.10 | 1.32 | 1.08 | 0.25 | 0.77 |
| Scn2aF1Scr2_{—} | | | | | | | | | | |
| U1 | | | | | | | | | | |
| 027_hRNU1- | 027 | hRNU1-1 | Scn2aB10 | mRn7sk | 1.17 | 1.19 | 0.88 | 1.08 | 0.18 | 0.77 |
| 1_Scn2aB10_{—} | | | | | | | | | | |
| mRn7sk | | | | | | | | | | |
| 071_hRNU1- | 071 | hRNU1-3 | Scn2aB10 | mRnu11 | 1.65 | 0.92 | 0.67 | 1.08 | 0.51 | 0.77 |
| 3_Scn2aB10_{—} | | | | | | | | | | |
| mRnu11 | | | | | | | | | | |
| 036_hRNU1- | 036 | hRNU1-2 | Scn2aB10 | RNU7-1 | 0.99 | 0.90 | 1.37 | 1.09 | 0.25 | 0.74 |
| 2_Scn2aB10_{—} | | | | | | | | | | |
| RNU7-1 | | | | | | | | | | |
| 031_hRNU1- | 031 | hRNU1-2 | Scn2aB10 | hRNU2-1 | 1.19 | 1.06 | 1.06 | 1.11 | 0.08 | 0.68 |
| 2_Scn2aB10_{—} | | | | | | | | | | |
| hRNU2-1 | | | | | | | | | | |
| 062_hRNU1- | 062 | hRNU1-3 | Scn2aB10 | hRN7SK | 0.89 | 1.49 | 1.05 | 1.14 | 0.31 | 0.55 |
| 3_Scn2aB10_{—} | | | | | | | | | | |
| hRN7SK | | | | | | | | | | |
| 086_hRNU2- | 086 | hRNU2-1 | Scn2aB10 | mRnu1a1 | 1.05 | 0.79 | 1.64 | 1.16 | 0.44 | 0.50 |
| 1_Scn2aB10_{—} | | | | | | | | | | |
| mRnu1a1 | | | | | | | | | | |
| 052_hRNU1- | 052 | hRNU1-3 | Scn2aB10 | hRNU1-2 | 1.34 | 1.32 | 0.84 | 1.16 | 0.28 | 0.48 |
| 3_Scn2aB10_{—} | | | | | | | | | | |
| hRNU1-2 | | | | | | | | | | |
| 053_hRNU1- | 053 | hRNU1-3 | Scn2aB10 | hRNU1-3 | 0.67 | 1.88 | 0.96 | 1.17 | 0.63 | 0.47 |
| 3_Scn2aB10_{—} | | | | | | | | | | |
| hRNU1-3 | | | | | | | | | | |
| 067_hRNU1- | 067 | hRNU1-3 | Scn2aB10 | mRnu3b1 | 1.26 | 1.18 | 1.09 | 1.18 | 0.09 | 0.45 |
| 3_Scn2aB10_{—} | | | | | | | | | | |
| mRnu3b1 | | | | | | | | | | |
| 042_hRNU1- | 042 | hRNU1-2 | Scn2aB10 | mRnu1b6 | 1.07 | 1.19 | 1.33 | 1.20 | 0.13 | 0.40 |
| 2_Scn2aB10_{—} | | | | | | | | | | |
| mRnu1b6 | | | | | | | | | | |
| 059_hRNU1- | 059 | hRNU1-3 | Scn2aB10 | RNU7-1 | 1.40 | 1.10 | 1.13 | 1.21 | 0.16 | 0.36 |
| 3_Scn2aB10_{—} | | | | | | | | | | |
| RNU7-1 | | | | | | | | | | |
| 063_hRNU1- | 063 | hRNU1-3 | Scn2aB10 | mRnu1a1 | 1.43 | 1.20 | 1.01 | 1.21 | 0.21 | 0.35 |
| 3_Scn2aB10_{—} | | | | | | | | | | |
| mRnu1a1 | | | | | | | | | | |
| 072_hRNU1- | 072 | hRNU1-3 | Scn2aB10 | mRnu12 | 1.01 | 1.18 | 1.47 | 1.22 | 0.23 | 0.34 |
| 3_Scn2aB10_{—} | | | | | | | | | | |
| mRnu12 | | | | | | | | | | |
| 005_hRNU1- | 005 | hRNU1-1 | Scn2aB10 | hRNU1-1 | 1.39 | 1.04 | 1.25 | 1.23 | 0.18 | 0.32 |
| 1_Scn2aB10_{—} | | | | | | | | | | |
| hRNU1-1 | | | | | | | | | | |
| 081_hRNU2- | 081 | hRNU2-1 | Scn2aB10 | hRNU6-1 | 1.55 | 1.13 | 1.02 | 1.23 | 0.28 | 0.31 |
| 1_Scn2aB10_{—} | | | | | | | | | | |
| hRNU6-1 | | | | | | | | | | |
| 060_hRNU1- | 060 | hRNU1-3 | Scn2aB10 | hRNU11 | 1.21 | 1.23 | 1.26 | 1.23 | 0.03 | 0.31 |
| 3_Scn2aB10_{—} | | | | | | | | | | |
| hRNU11 | | | | | | | | | | |
| 013_hRNU1- | 013 | hRNU1-1 | Scn2aB10 | RNU7-1 | 1.28 | 1.13 | 1.31 | 1.24 | 0.10 | 0.29 |
| 1_Scn2aB10_{—} | | | | | | | | | | |
| RNU7-1 | | | | | | | | | | |
| 008_hRNU1- | 008 | hRNU1-1 | Scn2aB10 | hRNU2-1 | 1.26 | 0.84 | 1.62 | 1.24 | 0.39 | 0.29 |
| 1_Scn2aB10_{—} | | | | | | | | | | |
| hRNU2-1 | | | | | | | | | | |
| 014_hRNU1- | 014 | hRNU1-1 | Scn2aB10 | hRNU11 | 1.25 | 1.34 | 1.13 | 1.24 | 0.11 | 0.29 |
| 1_Scn2aB10_{—} | | | | | | | | | | |
| hRNU11 | | | | | | | | | | |
| 049_hRNU1- | 049 | hRNU1-2 | Scn2aB10 | mRnu12 | 1.27 | 1.26 | 1.19 | 1.24 | 0.04 | 0.29 |
| 2_Scn2aB10_{—} | | | | | | | | | | |
| mRnu12 | | | | | | | | | | |
| 032_hRNU1- | 032 | hRNU1-2 | Scn2aB10 | hU3 | 1.27 | 1.46 | 1.03 | 1.25 | 0.21 | 0.26 |
| 2_Scn2aB10_{—} | | | | | | | | | | |
| hU3 | | | | | | | | | | |
| 058_hRNU1- | 058 | hRNU1-3 | Scn2aB10 | hRNU6-1 | 1.41 | 1.06 | 1.31 | 1.26 | 0.18 | 0.25 |
| 3_Scn2aB10_{—} | | | | | | | | | | |
| hRNU6-1 | | | | | | | | | | |
| 051_hRNU1- | 051 | hRNU1-3 | Scn2aB10 | hRNU1-1 | 1.60 | 1.05 | 1.17 | 1.27 | 0.29 | 0.23 |
| 3_Scn2aB10_{—} | | | | | | | | | | |
| hRNU1-1 | | | | | | | | | | |
| 020_hRNU1- | 020 | hRNU1-1 | Scn2aB10 | mRnu2-10 | 1.27 | 1.39 | 1.15 | 1.27 | 0.12 | 0.23 |
| 1_Scn2aB10_{—} | | | | | | | | | | |
| mRnu2-10 | | | | | | | | | | |
| 064_hRNU1- | 064 | hRNU1-3 | Scn2aB10 | mRnu1b1 | 1.32 | 1.09 | 1.43 | 1.28 | 0.17 | 0.21 |
| 3_Scn2aB10_{—} | | | | | | | | | | |
| mRnu1b1 | | | | | | | | | | |
| 096_hRNU2- | 096 | hRNU2-1 | Scn2aB10 | mRn7sk | 1.27 | 1.32 | 1.25 | 1.28 | 0.04 | 0.21 |
| 1_Scn2aB10_{—} | | | | | | | | | | |
| mRn7sk | | | | | | | | | | |
| 061_hRNU1- | 061 | hRNU1-3 | Scn2aB10 | hRNU12 | 1.76 | 0.96 | 1.17 | 1.30 | 0.41 | 0.19 |
| 3_Scn2aB10_{—} | | | | | | | | | | |
| hRNU12 | | | | | | | | | | |
| 034_hRNU1- | 034 | hRNU1-2 | Scn2aB10 | hRNU5A-1 | 1.37 | 1.19 | 1.34 | 1.30 | 0.10 | 0.18 |
| 2_Scn2aB10_{—} | | | | | | | | | | |
| hRNU5A-1 | | | | | | | | | | |
| 055_hRNU1- | 055 | hRNU1-3 | Scn2aB10 | hU3 | 1.29 | 1.50 | 1.12 | 1.30 | 0.19 | 0.18 |
| 3_Scn2aB10_{—} | | | | | | | | | | |
| hU3 | | | | | | | | | | |
| 078_hRNU2- | 078 | hRNU2-1 | Scn2aB10 | hU3 | 1.42 | 1.19 | 1.32 | 1.31 | 0.12 | 0.17 |
| 1_Scn2aB10_{—} | | | | | | | | | | |
| hU3 | | | | | | | | | | |
| 012_hRNU1- | 012 | hRNU1-1 | Scn2aB10 | hRNU6-1 | 1.35 | 1.50 | 1.09 | 1.31 | 0.20 | 0.16 |
| 1_Scn2aB10_{—} | | | | | | | | | | |
| hRNU6-1 | | | | | | | | | | |
| 037_hRNU1- | 037 | hRNU1-2 | Scn2aB10 | hRNU11 | 1.53 | 1.12 | 1.30 | 1.32 | 0.21 | 0.16 |
| 2_Scn2aB10_{—} | | | | | | | | | | |
| hRNU11 | | | | | | | | | | |
| 025_hRNU1- | 025 | hRNU1-1 | Scn2aB10 | mRnu11 | 1.78 | 1.31 | 0.87 | 1.32 | 0.46 | 0.15 |
| 1_Scn2aB10_{—} | | | | | | | | | | |
| mRnu11 | | | | | | | | | | |
| 007_hRNU1- | 007 | hRNU1-1 | Scn2aB10 | hRNU1-3 | 1.44 | 1.32 | 1.21 | 1.32 | 0.11 | 0.15 |
| 1_Scn2aB10_{—} | | | | | | | | | | |
| hRNU1-3 | | | | | | | | | | |
| 077_hRNU2- | 077 | hRNU2-1 | Scn2aB10 | hRNU2-1 | 1.54 | 1.15 | 1.29 | 1.33 | 0.20 | 0.14 |
| 1_Scn2aB10_{—} | | | | | | | | | | |
| hRNU2-1 | | | | | | | | | | |
| 022_hRNU1- | 022 | hRNU1-1 | Scn2aB10 | mRnu5g | 1.33 | 1.41 | 1.24 | 1.33 | 0.08 | 0.14 |
| 1_Scn2aB10_{—} | | | | | | | | | | |
| mRnu5g | | | | | | | | | | |
| 019_hRNU1- | 019 | hRNU1-1 | Scn2aB10 | mRnu1b6 | 1.98 | 1.04 | 0.98 | 1.33 | 0.56 | 0.14 |
| 1_Scn2aB10_{—} | | | | | | | | | | |
| mRnu1b6 | | | | | | | | | | |
| 003_mu1a1_{—} | 003 | mu1a1 | Scn2aD12 | U1 | 0.95 | 1.49 | 1.59 | 1.34 | 0.35 | 0.12 |
| Scn2aD12_U1 | | | | | | | | | | |
| 065_hRNU1- | 065 | hRNU1-3 | Scn2aB10 | mRnu1b6 | 1.57 | 1.39 | 1.07 | 1.34 | 0.25 | 0.12 |
| 3_Scn2aB10_{—} | | | | | | | | | | |
| mRnu1b6 | | | | | | | | | | |
| 045_hRNU1- | 045 | hRNU1-2 | Scn2aB10 | mRnu5g | 1.42 | 1.21 | 1.40 | 1.35 | 0.11 | 0.12 |
| 2_Scn2aB10_{—} | | | | | | | | | | |
| mRnu5g | | | | | | | | | | |
| 018_hRNU1- | 018 | hRNU1-1 | Scn2aB10 | mRnu1b1 | 1.75 | 1.38 | 0.93 | 1.35 | 0.41 | 0.11 |
| 1_Scn2aB10_{—} | | | | | | | | | | |
| mRnu1b1 | | | | | | | | | | |
| 070_hRNU1- | 070 | hRNU1-3 | Scn2aB10 | mRnu7 | 1.59 | 1.26 | 1.21 | 1.35 | 0.21 | 0.11 |
| 3_Scn2aB10_{—} | | | | | | | | | | |
| mRnu7 | | | | | | | | | | |
| 006_hRNU1- | 006 | hRNU1-1 | Scn2aB10 | hRNU1-2 | 0.98 | 1.92 | 1.16 | 1.36 | 0.50 | 0.11 |
| 1_Scn2aB10_{—} | | | | | | | | | | |
| hRNU1-2 | | | | | | | | | | |
| 024_hRNU1- | 024 | hRNU1-1 | Scn2aB10 | mRnu7 | 1.54 | 1.43 | 1.11 | 1.36 | 0.22 | 0.11 |
| 1_Scn2aB10_{—} | | | | | | | | | | |
| mRnu7 | | | | | | | | | | |
| 035_hRNU1- | 035 | hRNU1-2 | Scn2aB10 | hRNU6-1 | 1.48 | 1.47 | 1.16 | 1.37 | 0.18 | 0.10 |
| 2_Scn2aB10_{—} | | | | | | | | | | |
| hRNU6-1 | | | | | | | | | | |
| 079_hRNU2- | 079 | hRNU2-1 | Scn2aB10 | hRNU4-1 | 1.44 | 1.40 | 1.34 | 1.39 | 0.05 | 0.08 |
| 1_Scn2aB10_{—} | | | | | | | | | | |
| hRNU4-1 | | | | | | | | | | |
| 040_hRNU1- | 040 | hRNU1-2 | Scn2aB10 | mRnu1a1 | 1.21 | 1.28 | 1.72 | 1.41 | 0.27 | 0.07 |
| 2_Scn2aB10_{—} | | | | | | | | | | |
| mRnu1a1 | | | | | | | | | | |
| 015_hRNU1- | 015 | hRNU1-1 | Scn2aB10 | hRNU12 | 1.43 | 1.45 | 1.34 | 1.41 | 0.06 | 0.07 |
| 1_Scn2aB10_{—} | | | | | | | | | | |
| hRNU12 | | | | | | | | | | |
| 095_hRNU2- | 095 | hRNU2-1 | Scn2aB10 | mRnu12 | 1.61 | 1.12 | 1.55 | 1.43 | 0.27 | 0.05 |
| 1_Scn2aB10_{—} | | | | | | | | | | |
| mRnu12 | | | | | | | | | | |
| 057_hRNU1- | 057 | hRNU1-3 | Scn2aB10 | hRNU5A-1 | 1.35 | 1.48 | 1.45 | 1.43 | 0.07 | 0.05 |
| 3_Scn2aB10_{—} | | | | | | | | | | |
| hRNU5A-1 | | | | | | | | | | |
| 089_hRNU2- | 089 | hRNU2-1 | Scn2aB10 | mRnu2-10 | 1.53 | 1.71 | 1.11 | 1.45 | 0.31 | 0.04 |
| 1_Scn2aB10_{—} | | | | | | | | | | |
| mRnu2-10 | | | | | | | | | | |
| 030_hRNU1- | 030 | hRNU1-2 | Scn2aB10 | hRNU1-3 | 1.10 | 1.61 | 1.66 | 1.45 | 0.31 | 0.04 |
| 2_Scn2aB10_{—} | | | | | | | | | | |
| hRNU1-3 | | | | | | | | | | |
| 066_hRNU1- | 066 | hRNU1-3 | Scn2aB10 | mRnu2-10 | 1.71 | 1.65 | 1.04 | 1.47 | 0.37 | 0.03 |
| 3_Scn2aB10_{—} | | | | | | | | | | |
| mRnu2-10 | | | | | | | | | | |
| 038_hRNU1- | 038 | hRNU1-2 | Scn2aB10 | hRNU12 | 1.62 | 1.33 | 1.47 | 1.47 | 0.14 | 0.03 |
| 2_Scn2aB10_{—} | | | | | | | | | | |
| hRNU12 | | | | | | | | | | |
| 029_hRNU1- | 029 | hRNU1-2 | Scn2aB10 | hRNU1-2 | 1.68 | 1.28 | 1.49 | 1.48 | 0.20 | 0.03 |
| 2_Scn2aB10_{—} | | | | | | | | | | |
| hRNU1-2 | | | | | | | | | | |
| 082_hRNU2- | 082 | hRNU2-1 | Scn2aB10 | RNU7-1 | 1.45 | 2.18 | 0.85 | 1.49 | 0.67 | 0.03 |
| 1_Scn2aB10_{—} | | | | | | | | | | |
| RNU7-1 | | | | | | | | | | |
| 076_hRNU2- | 076 | hRNU2-1 | Scn2aB10 | hRNU1-3 | 1.67 | 1.49 | 1.35 | 1.50 | 0.16 | 0.02 |
| 1_Scn2aB10_{—} | | | | | | | | | | |
| hRNU1-3 | | | | | | | | | | |
| 041_hRNU1- | 041 | hRNU1-2 | Scn2aB10 | mRnu1b1 | 1.37 | 1.73 | 1.42 | 1.51 | 0.19 | 0.02 |
| 2_Scn2aB10_{—} | | | | | | | | | | |
| mRnu1b1 | | | | | | | | | | |
| 094_hRNU2- | 094 | hRNU2-1 | Scn2aB10 | mRnu11 | 1.54 | 1.58 | 1.44 | 1.52 | 0.07 | 0.02 |
| 1_Scn2aB10_{—} | | | | | | | | | | |
| mRnu11 | | | | | | | | | | |
| 088_hRNU2- | 088 | hRNU2-1 | Scn2aB10 | mRnu1b6 | 1.49 | 1.49 | 1.58 | 1.52 | 0.05 | 0.02 |
| 1_Scn2aB10_{—} | | | | | | | | | | |
| mRnu1b6 | | | | | | | | | | |
| 068_hRNU1- | 068 | hRNU1-3 | Scn2aB10 | mRnu5g | 1.13 | 1.74 | 1.70 | 1.52 | 0.34 | 0.02 |
| 3_Scn2aB10_{—} | | | | | | | | | | |
| mRnu5g | | | | | | | | | | |
| 087_hRNU2- | 087 | hRNU2-1 | Scn2aB10 | mRnu1b1 | 1.23 | 1.79 | 1.55 | 1.53 | 0.28 | 0.02 |
| 1_Scn2aB10_{—} | | | | | | | | | | |
| mRnu1b1 | | | | | | | | | | |
| 080_hRNU2- | 080 | hRNU2-1 | Scn2aB10 | hRNU5A-1 | 1.88 | 1.58 | 1.14 | 1.54 | 0.37 | 0.02 |
| 1_Scn2aB10_{—} | | | | | | | | | | |
| hRNU5A-1 | | | | | | | | | | |
| 047_hRNU1- | 047 | hRNU1-2 | Scn2aB10 | mRnu7 | 1.26 | 1.63 | 1.72 | 1.54 | 0.24 | 0.01 |
| 2_Scn2aB10_{—} | | | | | | | | | | |
| mRnu7 | | | | | | | | | | |
| 056_hRNU1- | 056 | hRNU1-3 | Scn2aB10 | hRNU4-1 | 1.59 | 1.83 | 1.19 | 1.54 | 0.32 | 0.01 |
| 3_Scn2aB10_{—} | | | | | | | | | | |
| hRNU4-1 | | | | | | | | | | |
| 011_hRNU1- | 011 | hRNU1-1 | Scn2aB10 | hRNU5A-1 | 1.30 | 2.09 | 1.24 | 1.54 | 0.48 | 0.01 |
| 1_Scn2aB10_{—} | | | | | | | | | | |
| hRNU5A-1 | | | | | | | | | | |
| 075_hRNU2- | 075 | hRNU2-1 | Scn2aB10 | hRNU1-2 | 1.57 | 1.52 | 1.56 | 1.55 | 0.03 | 0.01 |
| 1_Scn2aB10_{—} | | | | | | | | | | |
| hRNU1-2 | | | | | | | | | | |
| 093_hRNU2- | 093 | hRNU2-1 | Scn2aB10 | mRnu7 | 1.38 | 1.88 | 1.39 | 1.55 | 0.28 | 0.01 |
| 1_Scn2aB10_{—} | | | | | | | | | | |
| mRnu7 | | | | | | | | | | |
| 009_hRNU1- | 009 | hRNU1-1 | Scn2aB10 | hU3 | 1.82 | 1.37 | 1.46 | 1.55 | 0.24 | 0.01 |
| 1_Scn2aB10_{—} | | | | | | | | | | |
| hU3 | | | | | | | | | | |
| 084_hRNU2- | 084 | hRNU2-1 | Scn2aB10 | hRNU12 | 1.68 | 1.50 | 1.47 | 1.55 | 0.11 | 0.01 |
| 1_Scn2aB10_{—} | | | | | | | | | | |
| hRNU12 | | | | | | | | | | |
| 083_hRNU2- | 083 | hRNU2-1 | Scn2aB10 | hRNU11 | 1.42 | 1.87 | 1.44 | 1.58 | 0.25 | 0.009 |
| 1_Scn2aB10_{—} | | | | | | | | | | |
| hRNU11 | | | | | | | | | | |
| 026_hRNU1- | 026 | hRNU1-1 | Scn2aB10 | mRnu12 | 1.30 | 1.68 | 1.91 | 1.63 | 0.31 | 0.004 |
| 1_Scn2aB10_{—} | | | | | | | | | | |
| mRnu12 | | | | | | | | | | |
| 074_hRNU2- | 074 | hRNU2-1 | Scn2aB10 | hRNU1-1 | 1.60 | 1.71 | 1.83 | 1.71 | 0.11 | 0.001 |
| 1_Scn2aB10_{—} | | | | | | | | | | |
| hRNU1-1 | | | | | | | | | | |
| 099_mu1a1_{—} | 099 | mu1a1 | Scn2aD12 | U1 | 2.02 | 1.67 | 1.50 | 1.73 | 0.27 | <0.001 |
| Scn2aD12_U1 | | | | | | | | | | |
| 010_hRNU1- | 010 | hRNU1-1 | Scn2aB10 | hRNU4-1 | 1.61 | 1.74 | 1.91 | 1.75 | 0.15 | <0.001 |
| 1_Scn2aB10_{—} | | | | | | | | | | |
| hRNU4-1 | | | | | | | | | | |
| 004_mu1a1_{—} | 004 | mu1a1 | Scn2aB10 | U1 | 1.57 | 2.11 | 1.62 | 1.77 | 0.30 | <0.001 |
| Scn2aB10_U1 | | | | | | | | | | |
| 028_hRNU1- | 028 | hRNU1-2 | Scn2aB10 | hRNU1-1 | 1.72 | 1.55 | 2.04 | 1.77 | 0.25 | <0.001 |
| 2_Scn2aB10_{—} | | | | | | | | | | |
| hRNU1-1 | | | | | | | | | | |
| 091_hRNU2- | 091 | hRNU2-1 | Scn2aB10 | mRnu5g | 1.50 | 2.16 | 1.87 | 1.84 | 0.33 | <0.001 |
| 1_Scn2aB10_{—} | | | | | | | | | | |
| mRnu5g | | | | | | | | | | |
| 017_hRNU1- | 017 | hRNU1-1 | Scn2aB10 | mRnu1a1 | 2.02 | 1.84 | 1.71 | 1.86 | 0.16 | <0.001 |
| 1_Scn2aB10_{—} | | | | | | | | | | |
| mRnu1a1 | | | | | | | | | | |

TABLE 9
Library 2 Summary

| Name | Rep1 | Rep2 | Rep3 | Average | SD | P-Value |
|---|---|---|---|---|---|---|
| 114_hU3_Scn2aB10_mRnu1b1 | 0.70 | 0.99 | 1.20 | 0.96 | 0.25 | 0.91 |
| 194_mu1a1_Scr2_U1 | 1.00 | 1.00 | 1.00 | 1.00 | 0.00 | Control |
| 113_hU3_Scn2aB10_mRnu1a1 | 0.89 | 0.89 | 1.26 | 1.01 | 0.22 | 0.97 |
| 178_hRNU6- | 0.95 | 0.98 | 1.18 | 1.04 | 0.12 | 0.91 |
| 1_Scn2aB10_RNU7-1 | | | | | | |
| 172_hRNU6- | 0.83 | 0.96 | 1.38 | 1.06 | 0.29 | 0.86 |
| 1_Scn2aB10_hRNU1-3 | | | | | | |
| 104_hU3_Scn2aB10_hRNU2-1 | 0.47 | 1.25 | 1.49 | 1.07 | 0.53 | 0.82 |
| 179_hRNU6- | 0.89 | 0.97 | 1.38 | 1.08 | 0.26 | 0.8 |
| 1_Scn2aB10_hRNU11 | | | | | | |
| 111_hU3_Scn2aB10_hRNU12 | 1.06 | 0.90 | 1.30 | 1.08 | 0.20 | 0.78 |
| 108_hU3_Scn2aB10_hRNU6-1 | 0.86 | 1.19 | 1.23 | 1.09 | 0.20 | 0.77 |
| 117_hU3_Scn2aB10_mRnu3b1 | 0.66 | 1.05 | 1.57 | 1.09 | 0.45 | 0.77 |
| 112_hU3_Scn2aB10_hRN7SK | 0.95 | 1.07 | 1.28 | 1.10 | 0.17 | 0.75 |
| 110_hU3_Scn2aB10_hRNU11 | 1.14 | 0.70 | 1.55 | 1.13 | 0.43 | 0.68 |
| 115_hU3_Scn2aB10_mRnu1b6 | 1.00 | 0.84 | 1.59 | 1.14 | 0.40 | 0.65 |
| 106_hU3_Scn2aB10_hRNU4-1 | 1.12 | 1.03 | 1.42 | 1.19 | 0.20 | 0.54 |
| 103_hU3_Scn2aB10_hRNU1-3 | 1.03 | 1.27 | 1.29 | 1.19 | 0.15 | 0.53 |
| 189_hRNU6- | 0.77 | 1.14 | 1.74 | 1.22 | 0.49 | 0.49 |
| 1_Scn2aB10_mRnu7 | | | | | | |
| 101_hU3_Scn2aB10_hRNU1-1 | 0.88 | 1.17 | 1.63 | 1.23 | 0.38 | 0.47 |
| 109_hU3_Scn2aB10_RNU7-1 | 1.14 | 0.94 | 1.61 | 1.23 | 0.34 | 0.46 |
| 123_hU3_Scn2aB10_mRn7sk | 1.08 | 1.47 | 1.24 | 1.27 | 0.19 | 0.4 |
| 122_hU3_Scn2aB10_mRnu12 | 0.93 | 1.47 | 1.41 | 1.27 | 0.30 | 0.39 |
| 181_hRNU6- | 0.99 | 1.08 | 1.82 | 1.30 | 0.46 | 0.34 |
| 1_Scn2aB10_hRN7SK | | | | | | |
| 163_hRNU5A- | 1.12 | 1.23 | 1.59 | 1.31 | 0.25 | 0.32 |
| 1_Scn2aB10_mRnu3b1 | | | | | | |
| 169_hRNU5A- | 1.06 | 1.09 | 1.80 | 1.32 | 0.42 | 0.31 |
| 1_Scn2aB10_mRn7sk | | | | | | |
| 162_hRNU5A- | 1.43 | 1.49 | 1.07 | 1.33 | 0.22 | 0.29 |
| 1_Scn2aB10_mRnu2-10 | | | | | | |
| 102_hU3_Scn2aB10_hRNU1-2 | 1.08 | 1.55 | 1.37 | 1.33 | 0.23 | 0.29 |
| 191_hRNU6- | 0.93 | 1.48 | 1.59 | 1.33 | 0.36 | 0.29 |
| 1_Scn2aB10_mRnu12 | | | | | | |
| 186_hRNU6- | 1.23 | 1.23 | 1.58 | 1.34 | 0.20 | 0.27 |
| 1_Scn2aB10_mRnu3b1 | | | | | | |
| 192_hRNU6- | 1.07 | 1.08 | 1.94 | 1.36 | 0.50 | 0.25 |
| 1_Scn2aB10_mRn7sk | | | | | | |
| 107_hU3_Scn2aB10_hRNU5A-1 | 1.24 | 0.97 | 1.92 | 1.38 | 0.49 | 0.23 |
| 200_RNU7- | 1.52 | 1.27 | 1.44 | 1.41 | 0.13 | 0.19 |
| 1_Scn2aB10_hRNU2-1 | | | | | | |
| 121_hU3_Scn2aB10_mRnu11 | 1.09 | 1.45 | 1.71 | 1.42 | 0.31 | 0.18 |
| 133_hRNU4- | 0.94 | 2.29 | 1.04 | 1.42 | 0.75 | 0.18 |
| 1_Scn2aB10_hRNU11 | | | | | | |
| 116_hU3_Scn2aB10_mRnu2-10 | 1.27 | 1.53 | 1.47 | 1.42 | 0.14 | 0.18 |
| 193_mu1a1_Scn2aF1Scr2_U1 | 1.57 | 1.05 | 1.70 | 1.44 | 0.34 | 0.16 |
| 175_hRNU6- | 1.16 | 1.24 | 1.95 | 1.45 | 0.44 | 0.15 |
| 1_Scn2aB10_hRNU4-1 | | | | | | |
| 187_hRNU6- | 1.19 | 1.78 | 1.47 | 1.48 | 0.29 | 0.13 |
| 1_Scn2aB10_mRnu5g | | | | | | |
| 146_hRNU4- | 1.35 | 1.50 | 1.58 | 1.48 | 0.12 | 0.13 |
| 1_Scn2aB10_mRn7sk | | | | | | |
| 190_hRNU6- | 1.17 | 1.76 | 1.54 | 1.49 | 0.30 | 0.12 |
| 1_Scn2aB10_mRnu11 | | | | | | |
| 139_hRNU4- | 1.45 | 1.76 | 1.26 | 1.49 | 0.25 | 0.12 |
| 1_Scn2aB10_mRnu2-10 | | | | | | |
| 120_hU3_Scn2aB10_mRnu7 | 1.51 | 1.31 | 1.67 | 1.50 | 0.18 | 0.11 |
| 182_hRNU6- | 1.14 | 1.50 | 1.86 | 1.50 | 0.36 | 0.11 |
| 1_Scn2aB10_mRnu1a1 | | | | | | |
| 177_hRNU6- | 0.70 | 1.52 | 2.34 | 1.52 | 0.82 | 0.1 |
| 1_Scn2aB10_hRNU6-1 | | | | | | |
| 180_hRNU6- | 0.92 | 1.61 | 2.13 | 1.55 | 0.61 | 0.08 |
| 1_Scn2aB10_hRNU12 | | | | | | |
| 176_hRNU6- | 1.36 | 1.17 | 2.18 | 1.57 | 0.54 | 0.07 |
| 1_Scn2aB10_hRNU5A-1 | | | | | | |
| 183_hRNU6- | 0.90 | 1.16 | 2.77 | 1.6 | 1.02 | 0.05 |
| 1_Scn2aB10_mRnu1b1 | | | | | | |
| 144_hRNU4- | 1.35 | 1.53 | 1.95 | 1.6 | 0.31 | 0.05 |
| 1_Scn2aB10_mRnu11 | | | | | | |
| 127_hRNU4- | 1.35 | 1.76 | 1.75 | 1.62 | 0.23 | 0.05 |
| 1_Scn2aB10_hRNU2-1 | | | | | | |
| 161_hRNU5A- | 1.60 | 1.21 | 2.13 | 1.65 | 0.46 | 0.04 |
| 1_Scn2aB10_mRnu1b6 | | | | | | |
| 140_hRNU4- | 1.37 | 1.52 | 2.12 | 1.67 | 0.40 | 0.03 |
| 1_Scn2aB10_mRnu3b1 | | | | | | |
| 174_hRNU6-1_Scn2aB10_hU3 | 1.45 | 1.47 | 2.13 | 1.68 | 0.39 | 0.03 |
| 185_hRNU6- | 1.07 | 1.97 | 2.02 | 1.69 | 0.53 | 0.03 |
| 1_Scn2aB10_mRnu2-10 | | | | | | |
| 135_hRNU4- | 1.13 | 1.36 | 2.58 | 1.69 | 0.78 | 0.03 |
| 1_Scn2aB10_hRN7SK | | | | | | |
| 150_hRNU5A- | 1.36 | 1.68 | 2.05 | 1.70 | 0.34 | 0.03 |
| 1_Scn2aB10_hRNU2-1 | | | | | | |
| 131_hRNU4- | 1.14 | 2.08 | 1.90 | 1.71 | 0.50 | 0.02 |
| 1_Scn2aB10_hRNU6-1 | | | | | | |
| 173_hRNU6- | 1.67 | 1.92 | 1.53 | 1.71 | 0.20 | 0.02 |
| 1_Scn2aB10_hRNU2-1 | | | | | | |
| 164_hRNU5A- | 1.09 | 2.14 | 1.89 | 1.71 | 0.55 | 0.02 |
| 1_Scn2aB10_mRnu5g | | | | | | |
| 145_hRNU4- | 1.01 | 1.59 | 2.52 | 1.71 | 0.76 | 0.02 |
| 1_Scn2aB10_mRnu12 | | | | | | |
| 199_RNU7- | 1.50 | 1.37 | 2.28 | 1.72 | 0.49 | 0.02 |
| 1_Scn2aB10_hRNU1-3 | | | | | | |
| 201_RNU7-1_Scn2aB10_hU3 | 1.64 | 1.34 | 2.17 | 1.72 | 0.42 | 0.02 |
| 170_hRNU6- | 1.33 | 2.00 | 1.83 | 1.72 | 0.35 | 0.02 |
| 1_Scn2aB10_hRNU1-1 | | | | | | |
| 184_hRNU6- | 1.18 | 1.61 | 2.43 | 1.74 | 0.63 | 0.02 |
| 1_Scn2aB10_mRnu1b6 | | | | | | |
| 137_hRNU4- | 1.53 | 1.43 | 2.34 | 1.77 | 0.50 | 0.01 |
| 1_Scn2aB10_mRnu1b1 | | | | | | |
| 198_RNU7- | 1.06 | 1.35 | 2.97 | 1.79 | 1.03 | 0.01 |
| 1_Scn2aB10_hRNU1-2 | | | | | | |
| 118_hU3_Scn2aB10_mRnu5g | 1.22 | 2.01 | 2.18 | 1.80 | 0.51 | 0.01 |
| 196_mu1a1_Scn2aB10_U1 | 1.45 | 1.55 | 2.48 | 1.83 | 0.57 | 0.009 |
| 158_hRNU5A- | 1.10 | 1.87 | 2.53 | 1.83 | 0.72 | 0.008 |
| 1_Scn2aB10_hRN7SK | | | | | | |
| 154_hRNU5A- | 1.82 | 1.61 | 2.08 | 1.84 | 0.24 | 0.008 |
| 1_Scn2aB10_hRNU6-1 | | | | | | |
| 149_hRNU5A- | 1.34 | 1.67 | 2.64 | 1.88 | 0.68 | 0.005 |
| 1_Scn2aB10_hRNU1-3 | | | | | | |
| 124_hRNU4- | 1.55 | 2.30 | 1.85 | 1.90 | 0.38 | 0.004 |
| 1_Scn2aB10_hRNU1-1 | | | | | | |
| 171_hRNU6- | 1.72 | 1.37 | 2.68 | 1.93 | 0.68 | 0.004 |
| 1_Scn2aB10_hRNU1-2 | | | | | | |
| 138_hRNU4- | 1.38 | 2.11 | 2.42 | 1.97 | 0.53 | 0.002 |
| 1_Scn2aB10_mRnu1b6 | | | | | | |
| 152_hRNU5A- | 2.47 | 1.90 | 1.58 | 1.99 | 0.45 | 0.002 |
| 1_Scn2aB10_hRNU4-1 | | | | | | |
| 130_hRNU4- | 1.68 | 2.14 | 2.16 | 1.99 | 0.27 | 0.002 |
| 1_Scn2aB10_hRNU5A-1 | | | | | | |
| 132_hRNU4- | 1.10 | 2.25 | 2.62 | 1.99 | 0.79 | 0.002 |
| 1_Scn2aB10_RNU7-1 | | | | | | |
| 156_hRNU5A- | 1.58 | 1.91 | 2.53 | 2.00 | 0.48 | 0.001 |
| 1_Scn2aB10_hRNU11 | | | | | | |
| 168_hRNU5A- | 2.10 | 1.81 | 2.14 | 2.01 | 0.18 | 0.001 |
| 1_Scn2aB10_mRnu12 | | | | | | |
| 126_hRNU4- | 0.89 | 2.60 | 2.68 | 2.05 | 1.01 | <0.001 |
| 1_Scn2aB10_hRNU1-3 | | | | | | |
| 136_hRNU4- | 2.31 | 1.44 | 2.49 | 2.08 | 0.57 | <0.001 |
| 1_Scn2aB10_mRnu1a1 | | | | | | |
| 143_hRNU4- | 2.24 | 1.51 | 2.53 | 2.09 | 0.53 | <0.001 |
| 1_Scn2aB10_mRnu7 | | | | | | |
| 141_hRNU4- | 2.12 | 2.06 | 2.12 | 2.10 | 0.03 | <0.001 |
| 1_Scn2aB10_mRnu5g | | | | | | |
| 160_hRNU5A- | 1.17 | 2.63 | 2.60 | 2.13 | 0.83 | <0.001 |
| 1_Scn2aB10_mRnu1b1 | | | | | | |
| 148_hRNU5A- | 1.31 | 2.75 | 2.49 | 2.18 | 0.77 | <0.001 |
| 1_Scn2aB10_hRNU1-2 | | | | | | |
| 125_hRNU4- | 1.64 | 2.48 | 2.44 | 2.19 | 0.47 | <0.001 |
| 1_Scn2aB10_hRNU1-2 | | | | | | |
| 100_mu1a1_Scn2aB10 U1 | 2.15 | 1.40 | 3.08 | 2.21 | 0.84 | <0.001 |
| 134_hRNU4- | 2.03 | 2.34 | 2.34 | 2.24 | 0.18 | <0.001 |
| 1_Scn2aB10_hRNU12 | | | | | | |
| 129_hRNU4- | 1.63 | 1.75 | 3.40 | 2.26 | 0.99 | <0.001 |
| 1_Scn2aB10_hRNU4-1 | | | | | | |
| 128_hRNU4-1_Scn2aB10_hU3 | 1.67 | 2.47 | 2.74 | 2.29 | 0.55 | <0.001 |
| 197_RNU7- | 1.50 | 2.31 | 3.26 | 2.36 | 0.88 | <0.001 |
| 1_Scn2aB10_hRNU1-1 | | | | | | |
| 159_hRNU5A- | 1.56 | 3.04 | 2.63 | 2.41 | 0.77 | <0.001 |
| 1_Scn2aB10_mRnu1a1 | | | | | | |
| 153_hRNU5A- | 2.89 | 1.60 | 2.84 | 2.44 | 0.73 | <0.001 |
| 1_Scn2aB10_hRNU5A-1 | | | | | | |
| 195 mu1a1 Scn2aD12_U1 | 1.75 | 2.06 | 3.58 | 2.47 | 0.98 | <0.001 |
| 157_hRNU5A- | 2.12 | 2.75 | 2.61 | 2.49 | 0.33 | <0.001 |
| 1_Scn2aB10_hRNU12 | | | | | | |
| 166_hRNU5A- | 1.85 | 2.95 | 3.27 | 2.69 | 0.74 | <0.001 |
| 1_Scn2aB10_mRnu7 | | | | | | |

TABLE 10
Library 3 Summary

| | | | | | | | | | | P-value |
|---|---|---|---|---|---|---|---|---|---|---|
| Name | ID | Promoter | U7 | Terminator | Rep1 | Rep2 | Rep3 | Average | SD | (ANOVA) |
| 259_hRNU12_ | 259 | hRNU12 | Scn2aB10 | mRnu3b1 | 0.77 | 0.63 | 0.70 | 0.70 | 0.07 | 0.15 |
| Scn2aB10_ | | | | | | | | | | |
| mRnu3b1 | | | | | | | | | | |
| 282_hRN7SK_ | 282 | hRN7SK | Scn2aB10 | mRnu3b1 | 1.00 | 0.83 | 0.85 | 0.89 | 0.09 | 0.79 |
| Scn2aB10_ | | | | | | | | | | |
| mRnu3b1 | | | | | | | | | | |
| 285_hRN7SK_ | 285 | hRN7SK | Scn2aB10 | mRnu7 | 1.03 | 0.80 | 0.86 | 0.90 | 0.12 | 0.81 |
| Scn2aB10_ | | | | | | | | | | |
| mRnu7 | | | | | | | | | | |
| 274_hRN7SK_ | 274 | hRN7SK | Scn2aB10 | RNU7-1 | 0.93 | 1.00 | 0.78 | 0.90 | 0.11 | 0.84 |
| Scn2aB10_ | | | | | | | | | | |
| RNU7-1 | | | | | | | | | | |
| 250_hRNU12_ | 250 | hRNU12 | Scn2aB10 | hRNU6-1 | 0.98 | 0.89 | 0.86 | 0.91 | 0.06 | 0.87 |
| Scn2aB10_ | | | | | | | | | | |
| hRNU6-1 | | | | | | | | | | |
| 290_mu1a1_ | 290 | mu1a1 | Scr2 | U1 | 0.99 | 1.06 | 0.76 | 0.94 | 0.15 | Control |
| Scr2_U1 | | | | | | | | | | |
| 251_hRNU12_ | 251 | hRNU12 | Scn2aB10 | RNU7-1 | 0.89 | 1.13 | 0.89 | 0.97 | 0.14 | 0.84 |
| Scn2aB10_ | | | | | | | | | | |
| RNU7-1 | | | | | | | | | | |
| 267_hRN7SK_ | 267 | hRN7SK | Scn2aB10 | hRNU1-2 | 1.06 | 1.03 | 0.92 | 1.00 | 0.07 | 0.69 |
| Scn2aB10_ | | | | | | | | | | |
| hRNU1-2 | | | | | | | | | | |
| 254_hRNU12_ | 254 | hRNU12 | Scn2aB10 | hRN7SK | 0.88 | 1.22 | 0.91 | 1.00 | 0.18 | 0.69 |
| Scn2aB10_ | | | | | | | | | | |
| hRN7SK | | | | | | | | | | |
| 273_hRN7SK_ | 273 | hRN7SK | Scn2aB10 | hRNU6-1 | 1.14 | 0.99 | 0.97 | 1.03 | 0.09 | 0.56 |
| Scn2aB10_ | | | | | | | | | | |
| hRNU6-1 | | | | | | | | | | |
| 268_hRN7SK_ | 268 | hRN7SK | Scn2aB10 | hRNU1-3 | 1.02 | 0.99 | 1.15 | 1.05 | 0.09 | 0.48 |
| Scn2aB10_ | | | | | | | | | | |
| hRNU1-3 | | | | | | | | | | |
| 271_hRN7SK_ | 271 | hRN7SK | Scn2aB10 | hRNU4-1 | 1.07 | 1.14 | 0.97 | 1.06 | 0.09 | 0.46 |
| Scn2aB10_ | | | | | | | | | | |
| hRNU4-1 | | | | | | | | | | |
| 289_mu1a1_ | 289 | mu1a1 | Scn2aF1Scr2 | U1 | 1.01 | 0.94 | 1.24 | 1.06 | 0.15 | 0.44 |
| Scn2aF1Scr2_ | | | | | | | | | | |
| U1 | | | | | | | | | | |
| 275_hRN7SK_ | 275 | hRN7SK | Scn2aB10 | hRNU11 | 1.03 | 1.11 | 1.10 | 1.08 | 0.05 | 0.39 |
| Scn2aB10_ | | | | | | | | | | |
| hRNU11 | | | | | | | | | | |
| 266_hRN7SK_ | 266 | hRN7SK | Scn2aB10 | hRNU1-1 | 1.17 | 1.02 | 1.05 | 1.08 | 0.08 | 0.39 |
| Scn2aB10_ | | | | | | | | | | |
| hRNU1-1 | | | | | | | | | | |
| 247_hRNU12_ | 247 | hRNU12 | Scn2aB10 | hU3 | 0.82 | 1.26 | 1.17 | 1.09 | 0.23 | 0.38 |
| Scn2aB10_hU3 | | | | | | | | | | |
| 257_hRNU12_ | 257 | hRNU12 | Scn2aB10 | mRnu1b6 | 0.98 | 1.09 | 1.19 | 1.09 | 0.11 | 0.37 |
| Scn2aB10_ | | | | | | | | | | |
| mRnu1b6 | | | | | | | | | | |
| 283_hRN7SK_ | 283 | hRN7SK | Scn2aB10 | mRnu5g | 0.99 | 1.30 | 1.04 | 1.11 | 0.17 | 0.3 |
| Scn2aB10_ | | | | | | | | | | |
| mRnu5g | | | | | | | | | | |
| 264_hRNU12_ | 264 | hRNU12 | Scn2aB10 | mRnu12 | 1.18 | 1.11 | 1.04 | 1.11 | 0.07 | 0.3 |
| Scn2aB10_ | | | | | | | | | | |
| mRnu12 | | | | | | | | | | |
| 246_hRNU12_ | 246 | hRNU12 | Scn2aB10 | hRNU2-1 | 1.15 | 1.13 | 1.07 | 1.12 | 0.04 | 0.28 |
| Scn2aB10_ | | | | | | | | | | |
| hRNU2-1 | | | | | | | | | | |
| 249_hRNU12_ | 249 | hRNU12 | Scn2aB10 | hRNU5A-1 | 1.0 | 1.27 | 1.05 | 1.12 | 0.13 | 0.27 |
| Scn2aB10_ | | | | | | | | | | |
| hRNU5A-1 | | | | | | | | | | |
| 248_hRNU12_ | 248 | hRNU12 | Scn2aB10 | hRNU4-1 | 1.01 | 1.19 | 1.17 | 1.13 | 0.10 | 0.26 |
| Scn2aB10_ | | | | | | | | | | |
| hRNU4-1 | | | | | | | | | | |
| 280_hRN7SK_ | 280 | hRN7SK | Scn2aB10 | mRnu1b6 | 1.16 | 1.16 | 1.07 | 1.13 | 0.05 | 0.24 |
| Scn2aB10_ | | | | | | | | | | |
| mRnu1b6 | | | | | | | | | | |
| 265_hRNU12_ | 265 | hRNU12 | Scn2aB10 | mRn7sk | 1.13 | 1.20 | 1.06 | 1.13 | 0.07 | 0.24 |
| Scn2aB10_ | | | | | | | | | | |
| mRn7sk | | | | | | | | | | |
| 256_hRNU12_ | 256 | hRNU12 | Scn2aB10 | mRnu1b1 | 1.01 | 1.14 | 1.26 | 1.14 | 0.12 | 0.23 |
| Scn2aB10_ | | | | | | | | | | |
| mRnu1b1 | | | | | | | | | | |
| 281_hRN7SK_ | 281 | hRN7SK | Scn2aB10 | mRnu2-10 | 1.31 | 1.01 | 1.10 | 1.14 | 0.16 | 0.22 |
| Scn2aB10_ | | | | | | | | | | |
| mRnu2-10 | | | | | | | | | | |
| 278_hRN7SK_ | 278 | hRN7SK | Scn2aB10 | mRnu1a1 | 1.02 | 1.22 | 1.19 | 1.15 | 0.11 | 0.21 |
| Scn2aB10_ | | | | | | | | | | |
| mRnu1a1 | | | | | | | | | | |
| 276_hRN7SK_ | 276 | hRN7SK | Scn2aB10 | hRNU12 | 1.35 | 1.32 | 0.82 | 1.16 | 0.30 | 0.17 |
| Scn2aB10_ | | | | | | | | | | |
| hRNU12 | | | | | | | | | | |
| 263_hRNU12_ | 263 | hRNU12 | Scn2aB10 | mRnu11 | 1.25 | 1.25 | 0.99 | 1.16 | 0.15 | 0.17 |
| Scn2aB10_ | | | | | | | | | | |
| mRnu11 | | | | | | | | | | |
| 242_hRNU11_ | 242 | hRNU11 | Scn2aB10 | mRn7sk | 1.12 | 1.20 | 1.29 | 1.21 | 0.09 | 0.11 |
| Scn2aB10_ | | | | | | | | | | |
| mRn7sk | | | | | | | | | | |
| 213 RNU7- | 213 | RNU7-1 | Scn2aB10 | mRnu3b1 | 1.26 | 1.17 | 1.20 | 1.21 | 0.05 | 0.1 |
| 1_Scn2aB10_ | | | | | | | | | | |
| mRnu3b1 | | | | | | | | | | |
| 258_hRNU12_ | 258 | hRNU12 | Scn2aB10 | mRnu2-10 | 1.21 | 1.44 | 1.00 | 1.21 | 0.22 | 0.09 |
| Scn2aB10_ | | | | | | | | | | |
| mRnu2-10 | | | | | | | | | | |
| 287_hRN7SK_ | 287 | hRN7SK | Scn2aB10 | mRnu12 | 1.10 | 1.52 | 1.03 | 1.22 | 0.27 | 0.09 |
| Scn2aB10_ | | | | | | | | | | |
| mRnu12 | | | | | | | | | | |
| 279_hRN7SK_ | 279 | hRN7SK | Scn2aB10 | mRnu1b1 | 1.31 | 1.14 | 1.20 | 1.22 | 0.09 | 0.09 |
| Scn2aB10_ | | | | | | | | | | |
| mRnu1b1 | | | | | | | | | | |
| 270_hRN7SK_ | 270 | hRN7SK | Scn2aB10 | hU3 | 1.10 | 1.50 | 1.07 | 1.22 | 0.24 | 0.08 |
| Scn2aB10_hU3 | | | | | | | | | | |
| 252_hRNU12_ | 252 | hRNU12 | Scn2aB10 | hRNU11 | 1.18 | 1.40 | 1.16 | 1.25 | 0.13 | 0.06 |
| Scn2aB10_ | | | | | | | | | | |
| hRNU11 | | | | | | | | | | |
| 231_hRNU11_ | 231 | hRNU11 | Scn2aB10 | hRN7SK | 1.26 | 1.27 | 1.23 | 1.25 | 0.02 | 0.06 |
| Scn2aB10_ | | | | | | | | | | |
| hRN7SK | | | | | | | | | | |
| 272_hRN7SK_ | 272 | hRN7SK | Scn2aB10 | hRNU5A-1 | 1.10 | 1.35 | 1.36 | 1.27 | 0.15 | 0.05 |
| Scn2aB10_ | | | | | | | | | | |
| hRNU5A-1 | | | | | | | | | | |
| 227_hRNU11_ | 227 | hRNU11 | Scn2aB10 | hRNU6-1 | 1.24 | 1.43 | 1.19 | 1.29 | 0.13 | 0.04 |
| Scn2aB10_ | | | | | | | | | | |
| hRNU6-1 | | | | | | | | | | |
| 205 RNU7- | 205 | RNU7-1 | Scn2aB10 | RNU7-1 | 1.11 | 1.62 | 1.14 | 1.29 | 0.29 | 0.03 |
| 1_Scn2aB10_ | | | | | | | | | | |
| RNU7-1 | | | | | | | | | | |
| 277_hRN7SK_ | 277 | hRN7SK | Scn2aB10 | hRN7SK | 1.10 | 1.46 | 1.32 | 1.29 | 0.18 | 0.03 |
| Scn2aB10_ | | | | | | | | | | |
| hRN7SK | | | | | | | | | | |
| 255_hRNU12_ | 255 | hRNU12 | Scn2aB10 | mRnu1a1 | 1.47 | 1.20 | 1.22 | 1.30 | 0.15 | 0.03 |
| Scn2aB10_ | | | | | | | | | | |
| mRnu1a1 | | | | | | | | | | |
| 207_RNU7- | 207 | RNU7-1 | Scn2aB10 | hRNU12 | 1.29 | 1.44 | 1.21 | 1.31 | 0.12 | 0.02 |
| 1_Scn2aB10_ | | | | | | | | | | |
| hRNU12 | | | | | | | | | | |
| 245_hRNU12_ | 245 | hRNU12 | Scn2aB10 | hRNU1-3 | 1.44 | 1.14 | 1.40 | 1.32 | 0.16 | 0.02 |
| Scn2aB10_ | | | | | | | | | | |
| hRNU1-3 | | | | | | | | | | |
| 243_hRNU12_ | 243 | hRNU12 | Scn2aB10 | hRNU1-1 | 1.54 | 1.10 | 1.37 | 1.34 | 0.22 | 0.02 |
| Scn2aB10_ | | | | | | | | | | |
| hRNU1-1 | | | | | | | | | | |
| 235_hRNU11_ | 235 | hRNU11 | Scn2aB10 | mRnu2-10 | 1.20 | 1.71 | 1.15 | 1.35 | 0.31 | 0.01 |
| Scn2aB10_ | | | | | | | | | | |
| mRnu2-10 | | | | | | | | | | |
| 204 RNU7- | 204 | RNU7-1 | Scn2aB10 | hRNU6-1 | 1.32 | 1.56 | 1.18 | 1.35 | 0.19 | 0.01 |
| 1_Scn2aB10_ | | | | | | | | | | |
| hRNU6-1 | | | | | | | | | | |
| 208 RNU7- | 208 | RNU7-1 | Scn2aB10 | hRN7SK | 1.46 | 1.39 | 1.21 | 1.35 | 0.13 | 0.01 |
| 1_Scn2aB10_ | | | | | | | | | | |
| hRN7SK | | | | | | | | | | |
| 288_hRN7SK_ | 288 | hRN7SK | Scn2aB10 | mRn7sk | 1.49 | 1.03 | 1.65 | 1.39 | 0.32 | 0.007 |
| Scn2aB10_ | | | | | | | | | | |
| mRn7sk | | | | | | | | | | |
| 239_hRNU11_ | 239 | hRNU11 | Scn2aB10 | mRnu7 | 1.49 | 1.42 | 1.27 | 1.39 | 0.11 | 0.006 |
| Scn2aB10_ | | | | | | | | | | |
| mRnu7 | | | | | | | | | | |
| 300_mRnu1a1_ | 300 | mRnu1a1 | Scn2aB10 | hRNU6-1 | 1.35 | 1.53 | 1.31 | 1.40 | 0.12 | 0.006 |
| Scn2aB10_ | | | | | | | | | | |
| hRNU6-1 | | | | | | | | | | |
| 240_hRNU11_ | 240 | hRNU11 | Scn2aB10 | mRnu11 | 1.23 | 1.57 | 1.50 | 1.43 | 0.18 | 0.003 |
| Scn2aB10_ | | | | | | | | | | |
| mRnu11 | | | | | | | | | | |
| 218_RNU7- | 218 | RNU7-1 | Scn2aB10 | mRnu12 | 1.72 | 1.31 | 1.29 | 1.44 | 0.24 | 0.003 |
| 1_Scn2aB10_ | | | | | | | | | | |
| mRnu12 | | | | | | | | | | |
| 234_hRNU11_ | 234 | hRNU11 | Scn2aB10 | mRnu1b6 | 1.61 | 1.43 | 1.30 | 1.45 | 0.16 | 0.002 |
| Scn2aB10_ | | | | | | | | | | |
| mRnu1b6 | | | | | | | | | | |
| 214_RNU7- | 214 | RNU7-1 | Scn2aB10 | mRnu5g | 1.25 | 1.63 | 1.46 | 1.45 | 0.19 | 0.002 |
| 1_Scn2aB10_ | | | | | | | | | | |
| mRnu5g | | | | | | | | | | |
| 269_hRN7SK_ | 269 | hRN7SK | Scn2aB10 | hRNU2-1 | 1.53 | 1.36 | 1.46 | 1.45 | 0.09 | 0.002 |
| Scn2aB10_ | | | | | | | | | | |
| hRNU2-1 | | | | | | | | | | |
| 212_RNU7- | 212 | RNU7-1 | Scn2aB10 | mRnu2-10 | 1.33 | 1.83 | 1.21 | 1.46 | 0.33 | 0.002 |
| 1_Scn2aB10_ | | | | | | | | | | |
| mRnu2-10 | | | | | | | | | | |
| 260_hRNU12_ | 260 | hRNU12 | Scn2aB10 | mRnu5g | 1.28 | 1.91 | 1.21 | 1.47 | 0.39 | 0.002 |
| Scn2aB10_ | | | | | | | | | | |
| mRnu5g | | | | | | | | | | |
| 219_RNU7- | 219 | RNU7-1 | Scn2aB10 | mRn7sk | 1.80 | 1.21 | 1.39 | 1.47 | 0.30 | 0.002 |
| 1_Scn2aB10_ | | | | | | | | | | |
| mRn7sk | | | | | | | | | | |
| 236_hRNU11_ | 236 | hRNU11 | Scn2aB10 | mRnu3b1 | 1.46 | 1.57 | 1.38 | 1.47 | 0.10 | 0.001 |
| Scn2aB10_ | | | | | | | | | | |
| mRnu3b1 | | | | | | | | | | |
| 228_hRNU11_ | 228 | hRNU11 | Scn2aB10 | RNU7-1 | 1.34 | 1.61 | 1.49 | 1.48 | 0.14 | 0.001 |
| Scn2aB10_ | | | | | | | | | | |
| RNU7-1 | | | | | | | | | | |
| 241_hRNU11_ | 241 | hRNU11 | Scn2aB10 | mRnu12 | 1.39 | 1.63 | 1.43 | 1.49 | 0.13 | 0.001 |
| Scn2aB10_ | | | | | | | | | | |
| mRnu12 | | | | | | | | | | |
| 237_hRNU11_ | 237 | hRNU11 | Scn2aB10 | mRnu5g | 1.67 | 1.30 | 1.51 | 1.49 | 0.19 | <0.001 |
| Scn2aB10_ | | | | | | | | | | |
| mRnu5g | | | | | | | | | | |
| 206_RNU7- | 206 | RNU7-1 | Scn2aB10 | hRNU11 | 1.46 | 1.53 | 1.50 | 1.50 | 0.04 | <0.001 |
| 1_Scn2aB10_ | | | | | | | | | | |
| hRNU11 | | | | | | | | | | |
| 217_RNU7- | 217 | RNU7-1 | Scn2aB10 | mRnu11 | 1.40 | 1.77 | 1.41 | 1.53 | 0.21 | <0.001 |
| 1_Scn2aB10_ | | | | | | | | | | |
| mRnu11 | | | | | | | | | | |
| 229_hRNU11_ | 229 | hRNU11 | Scn2aB10 | hRNU11 | 1.44 | 1.78 | 1.43 | 1.55 | 0.20 | <0.001 |
| Scn2aB10_ | | | | | | | | | | |
| hRNU11 | | | | | | | | | | |
| 233_hRNU11_ | 233 | hRNU11 | Scn2aB10 | mRnu1b1 | 1.42 | 1.79 | 1.54 | 1.58 | 0.19 | <0.001 |
| Scn2aB10_ | | | | | | | | | | |
| mRnu1b1 | | | | | | | | | | |
| 296_mRnu1a1 | 296 | mRnu1a1 | Scn2aB10 | hRNU2-1 | 1.49 | 1.88 | 1.39 | 1.59 | 0.26 | <0.001 |
| Scn2aB10_ | | | | | | | | | | |
| hRNU2-1 | | | | | | | | | | |
| 211_RNU7- | 211 | RNU7-1 | Scn2aB10 | mRnu1b6 | 1.70 | 1.32 | 1.76 | 1.59 | 0.24 | <0.001 |
| 1_Scn2aB10 | | | | | | | | | | |
| mRnu1b6 | | | | | | | | | | |
| 202_RNU7- | 202 | RNU7-1 | Scn2aB10 | hRNU4-1 | 1.28 | 1.69 | 1.84 | 1.60 | 0.29 | <0.001 |
| 1_Scn2aB10_ | | | | | | | | | | |
| hRNU4-1 | | | | | | | | | | |
| 244_hRNU12_ | 244 | hRNU12 | Scn2aB10 | hRNU1-2 | 1.59 | 1.54 | 1.70 | 1.6 | 0.08 | <0.001 |
| Scn2aB10_ | | | | | | | | | | |
| hRNU1-2 | | | | | | | | | | |
| 223_hRNU11_ | 223 | hRNU11 | Scn2aB10 | hRNU2-1 | 1.71 | 1.56 | 1.64 | 1.63 | 0.07 | <0.001 |
| Scn2aB10_ | | | | | | | | | | |
| hRNU2-1 | | | | | | | | | | |
| 209 RNU7- | 209 | RNU7-1 | Scn2aB10 | mRnu1a1 | 1.40 | 1.80 | 1.76 | 1.65 | 0.22 | <0.001 |
| 1_Scn2aB10_ | | | | | | | | | | |
| mRnu1a1 | | | | | | | | | | |
| 225_hRNU11_ | 225 | hRNU11 | Scn2aB10 | hRNU4-1 | 1.43 | 1.51 | 2.04 | 1.66 | 0.33 | <0.001 |
| Scn2aB10_ | | | | | | | | | | |
| hRNU4-1 | | | | | | | | | | |
| 230_hRNU11_ | 230 | hRNU11 | Scn2aB10 | hRNU12 | 1.49 | 1.53 | 2.01 | 1.67 | 0.29 | <0.001 |
| Scn2aB10_ | | | | | | | | | | |
| hRNU12 | | | | | | | | | | |
| 293_mRnu1a1_ | 293 | mRnu1a1 | Scn2aB10 | hRNU1-1 | 1.42 | 1.87 | 1.74 | 1.68 | 0.23 | <0.001 |
| Scn2aB10_ | | | | | | | | | | |
| hRNU1-1 | | | | | | | | | | |
| 294_mRnu1a1_ | 294 | mRnu1a1 | Scn2aB10 | hRNU1-2 | 1.78 | 1.49 | 1.82 | 1.70 | 0.18 | <0.001 |
| Scn2aB10_ | | | | | | | | | | |
| hRNU1-2 | | | | | | | | | | |
| 291 mu1a1_ | 291 | mu1a1 | Scn2aD12 | U1 | 1.78 | 1.85 | 1.50 | 1.71 | 0.19 | <0.001 |
| Scn2aD 12 U1 | | | | | | | | | | |
| 216 RNU7- | 216 | RNU7-1 | Scn2aB10 | mRnu7 | 1.62 | 1.53 | 2.02 | 1.72 | 0.26 | <0.001 |
| 1_Scn2aB10_ | | | | | | | | | | |
| mRnu7 | | | | | | | | | | |
| 221_hRNU11_ | 221 | hRNU11 | Scn2aB10 | hRNU1-2 | 1.83 | 1.75 | 1.59 | 1.72 | 0.12 | <0.001 |
| Scn2aB10_ | | | | | | | | | | |
| hRNU1-2 | | | | | | | | | | |
| 297_mRnu1a1_ | 297 | mRnu1a1 | Scn2aB10 | hU3 | 1.88 | 1.60 | 1.69 | 1.72 | 0.14 | <0.001 |
| Scn2aB10_hU3 | | | | | | | | | | |
| 299_mRnu1a1_ | 299 | mRnu1a1 | Scn2aB10 | hRNU5A-1 | 2.06 | 1.68 | 1.49 | 1.74 | 0.29 | <0.001 |
| Scn2aB10_ | | | | | | | | | | |
| hRNU5A-1 | | | | | | | | | | |
| 222_hRNU11_ | 222 | hRNU11 | Scn2aB10 | hRNU1-3 | 1.55 | 2.06 | 1.72 | 1.78 | 0.26 | <0.001 |
| Scn2aB10_ | | | | | | | | | | |
| hRNU1-3 | | | | | | | | | | |
| 232_hRNU11_ | 232 | hRNU11 | Scn2aB10 | mRnu1a1 | 2.24 | 1.62 | 1.54 | 1.80 | 0.38 | <0.001 |
| Scn2aB10_ | | | | | | | | | | |
| mRnu1a1 | | | | | | | | | | |
| 298_mRnu1a1_ | 298 | mRnu1a1 | Scn2aB10 | hRNU4-1 | 2.06 | 1.52 | 1.99 | 1.86 | 0.29 | <0.001 |
| Scn2aB10_ | | | | | | | | | | |
| hRNU4-1 | | | | | | | | | | |
| 226_hRNU11 | 226 | hRNU11 | Scn2aB10 | hRNU5A-1 | 2.0 | 1.74 | 1.79 | 1.86 | 0.16 | <0.001 |
| Scn2aB10_ | | | | | | | | | | |
| hRNU5A-1 | | | | | | | | | | |
| 224_hRNU11 | 224 | hRNU11 | Scn2aB10 | hU3 | 1.75 | 2.06 | 1.87 | 1.89 | 0.15 | <0.001 |
| Scn2aB10_hU3 | | | | | | | | | | |
| 220_hRNU11_ | 220 | hRNU11 | Scn2aB10 | hRNU1-1 | 2.1 | 1.79 | 1.77 | 1.89 | 0.19 | <0.001 |
| Scn2aB10_ | | | | | | | | | | |
| hRNU1-1 | | | | | | | | | | |
| 295_mRnu1a1_ | 295 | mRnu1a1 | Scn2aB10 | hRNU1-3 | 2.09 | 2.21 | 1.51 | 1.93 | 0.38 | <0.001 |
| Scn2aB10_ | | | | | | | | | | |
| hRNU1-3 | | | | | | | | | | |
| 301_mRnu1a1_ | 301 | mRnu1a1 | Scn2aB10 | RNU7-1 | 2.03 | 1.95 | 1.82 | 1.94 | 0.11 | <0.001 |
| Scn2aB10_ | | | | | | | | | | |
| RNU7-1 | | | | | | | | | | |
| 203_RNU7- | 203 | RNU7-1 | Scn2aB10 | hRNU5A-1 | 2.54 | 2.11 | 1.78 | 2.14 | 0.38 | <0.001 |
| 1_Scn2aB10_ | | | | | | | | | | |
| hRNU5A-1 | | | | | | | | | | |

TABLE 11
Library 4 Summary

| | | | | | New4- | New4- | New4- | Aver- | | P-value |
|---|---|---|---|---|---|---|---|---|---|---|
| Name | ID | Promoter | U7 | Terminator | 1 | 2 | 3 | age | SD | (ANOVA) |
| 347_mRnu1b6_ | 347 | mRnu1b6 | Scn2aB10 | RNU7-1 | 1.09 | 0.81 | 0.86 | 0.92 | 0.15 | 0.64 |
| Scn2aB10_ | | | | | | | | | | |
| RNU7-1 | | | | | | | | | | |
| 385_mu1a1 | 385 | mu1a1 | Scn2aF1Scr2 | U1 | 1.01 | 0.90 | 1.09 | 1.00 | 0.09 | Control |
| Scn2aF1Scr2_U1 | | | | | | | | | | |
| 386_mu1a1_ | 386 | mu1a1 | Scr2 | U1 | 0.99 | 1.10 | 0.91 | 1.00 | 0.09 | >0.99 |
| Scr2_U1 | | | | | | | | | | |
| 327_mRnu1b1 | 327 | mRnu1b1 | Scn2aB10 | hRN7SK | 1.31 | 1.16 | 1.19 | 1.22 | 0.08 | 0.2 |
| Scn2aB10_ | | | | | | | | | | |
| hRN7SK | | | | | | | | | | |
| 346_mRnu1b6 | 346 | mRnu1b6 | Scn2aB10 | hRNU6-1 | 1.32 | 1.24 | 1.12 | 1.22 | 0.10 | 0.18 |
| Scn2aB10_ | | | | | | | | | | |
| hRNU6-1 | | | | | | | | | | |
| 338_mRnu1b1 | 338 | mRnu1b1 | Scn2aB10 | mRn7sk | 1.48 | 1.04 | 1.35 | 1.29 | 0.23 | 0.09 |
| Scn2aB10_ | | | | | | | | | | |
| mRn7sk | | | | | | | | | | |
| 323_mRnu1b1 | 323 | mRnu1b1 | Scn2aB10 | hRNU6-1 | 1.44 | 1.03 | 1.47 | 1.31 | 0.24 | 0.07 |
| Scn2aB10_ | | | | | | | | | | |
| hRNU6-1 | | | | | | | | | | |
| 355_mRnu1b6 | 355 | mRnu1b6 | Scn2aB10 | mRnu3b1 | 0.87 | 2.13 | 1.01 | 1.3 | 0.69 | 0.05 |
| Scn2aB10_ | | | | | | | | | | |
| mRnu3b1 | | | | | | | | | | |
| 332_mRnu1b1 | 332 | mRnu1b1 | Scn2aB10 | mRnu3b1 | 1.51 | 1.10 | 1.40 | 1.34 | 0.21 | 0.05 |
| Scn2aB10_ | | | | | | | | | | |
| mRnu3b1 | | | | | | | | | | |
| 356_mRnu1b6 | 356 | mRnu1b6 | Scn2aB10 | mRnu5g | 1.68 | 0.91 | 1.44 | 1.34 | 0.39 | 0.04 |
| Scn2aB10_ | | | | | | | | | | |
| mRnu5g | | | | | | | | | | |
| 350_mRnu1b6 | 350 | mRnu1b6 | Scn2aB10 | hRN7SK | 1.40 | 1.33 | 1.44 | 1.39 | 0.06 | 0.02 |
| Scn2aB10_ | | | | | | | | | | |
| hRN7SK | | | | | | | | | | |
| 309_mRnu1a1 | 309 | mRnu1a1 | Scn2aB10 | mRnu3b1 | 1.55 | 1.2 | 1.39 | 1.39 | 0.16 | 0.02 |
| Scn2aB10_ | | | | | | | | | | |
| mRnu3b1 | | | | | | | | | | |
| 384_mRnu2- | 384 | mRnu2-10 | Scn2aB10 | mRn7sk | 1.58 | 1.28 | 1.40 | 1.42 | 0.15 | 0.01 |
| 10_Scn2aB10_ | | | | | | | | | | |
| mRn7sk | | | | | | | | | | |
| 315_mRnu1a1 | 315 | mRnu1a1 | Scn2aB10 | mRn7sk | 1.57 | 1.11 | 1.59 | 1.42 | 0.27 | 0.01 |
| Scn2aB10_ | | | | | | | | | | |
| mRn7sk | | | | | | | | | | |
| 319_mRnu1b1 | 319 | mRnu1b1 | Scn2aB10 | hRNU2-1 | 1.42 | 1.33 | 1.53 | 1.43 | 0.10 | 0.01 |
| Scn2aB10_ | | | | | | | | | | |
| hRNU2-1 | | | | | | | | | | |
| 378_mRnu2- | 378 | mRnu2-10 | Scn2aB10 | mRnu3b1 | 1.56 | 1.25 | 1.54 | 1.45 | 0.17 | 0.008 |
| 10_Scn2aB10_ | | | | | | | | | | |
| mRnu3b1 | | | | | | | | | | |
| 337_mRnu1b1 | 337 | mRnu1b1 | Scn2aB10 | mRnu12 | 1.59 | 1.27 | 1.55 | 1.47 | 0.18 | 0.006 |
| Scn2aB10_ | | | | | | | | | | |
| mRnu12 | | | | | | | | | | |
| 400_mRnu3b1 | 400 | mRnu3b1 | Scn2aB10 | hRN7SK | 1.74 | 1.34 | 1.35 | 1.48 | 0.23 | 0.005 |
| Scn2aB10_ | | | | | | | | | | |
| hRN7SK | | | | | | | | | | |
| 324_mRnu1b1 | 324 | mRnu1b1 | Scn2aB10 | RNU7-1 | 1.57 | 1.29 | 1.59 | 1.48 | 0.17 | 0.005 |
| Scn2aB10_ | | | | | | | | | | |
| RNU7-1 | | | | | | | | | | |
| 316_mRnu1b1 | 316 | mRnu1b1 | Scn2aB10 | hRNU1-1 | 1.56 | 1.49 | 1.41 | 1.49 | 0.07 | 0.004 |
| Scn2aB10_ | | | | | | | | | | |
| hRNU1-1 | | | | | | | | | | |
| 351_mRnu1b6 | 351 | mRnu1b6 | Scn2aB10 | mRnu1a1 | 1.24 | 1.55 | 1.68 | 1.49 | 0.23 | 0.004 |
| Scn2aB10_ | | | | | | | | | | |
| mRnu1a1 | | | | | | | | | | |
| 354_mRnu1b6 | 354 | mRnu1b6 | Scn2aB10 | mRnu2-10 | 1.62 | 1.40 | 1.50 | 1.50 | 0.11 | 0.003 |
| Scn2aB10_ | | | | | | | | | | |
| mRnu2-10 | | | | | | | | | | |
| 331_mRnu1b1 | 331 | mRnu1b1 | Scn2aB10 | mRnu2-10 | 1.71 | 1.42 | 1.50 | 1.55 | 0.15 | 0.002 |
| Scn2aB10_ | | | | | | | | | | |
| mRnu2-10 | | | | | | | | | | |
| 373_mRnu2- | 373 | mRnu2-10 | Scn2aB10 | hRN7SK | 1.66 | 1.30 | 1.7 | 1.56 | 0.22 | 0.001 |
| 10_Scn2aB10_ | | | | | | | | | | |
| hRN7SK | | | | | | | | | | |
| 317_mRnu1b1 | 317 | mRnu1b1 | Scn2aB10 | hRNU1-2 | 1.93 | 1.38 | 1.42 | 1.57 | 0.31 | <0.001 |
| Scn2aB10_hRN | | | | | | | | | | |
| U1-2 | | | | | | | | | | |
| 361_mRnu1b6 | 361 | mRnu1b6 | Scn2aB10 | mRn7sk | 1.85 | 1.29 | 1.61 | 1.58 | 0.28 | <0.001 |
| Scn2aB10_ | | | | | | | | | | |
| mRn7sk | | | | | | | | | | |
| 387_mu1a1 | 387 | mu1a1 | Scn2aD12 | U1 | 1.74 | 1.41 | 1.64 | 1.60 | 0.17 | <0.001 |
| Scn2aD12_U1 | | | | | | | | | | |
| 325_mRnu1b1 | 325 | mRnu1b1 | Scn2aB10 | hRNU11 | 1.77 | 1.38 | 1.66 | 1.60 | 0.20 | <0.001 |
| Scn2aB10_ | | | | | | | | | | |
| hRNU11 | | | | | | | | | | |
| 304_mRnu1a1 | 304 | mRnu1a1 | Scn2aB10 | hRN7SK | 1.65 | 1.39 | 1.77 | 1.60 | 0.19 | <0.001 |
| Scn2aB10_ | | | | | | | | | | |
| hRN7SK | | | | | | | | | | |
| 396_mRnu3b1 | 396 | mRnu3b1 | Scn2aB10 | hRNU6-1 | 1.68 | 1.37 | 1.80 | 1.61 | 0.22 | <0.001 |
| Scn2aB10_ | | | | | | | | | | |
| hRNU6-1 | | | | | | | | | | |
| 342_mRnu1b6 | 342 | mRnu1b6 | Scn2aB10 | hRNU2-1 | 1.86 | 1.25 | 1.74 | 1.62 | 0.32 | <0.001 |
| Scn2aB10_ | | | | | | | | | | |
| hRNU2-1 | | | | | | | | | | |
| 381_mRnu2- | 381 | mRnu2-10 | Scn2aB10 | mRnu7 | 1.72 | 1.41 | 1.73 | 1.62 | 0.18 | <0.001 |
| 10_Scn2aB10_ | | | | | | | | | | |
| mRnu7 | | | | | | | | | | |
| 369_mRnu2- | 369 | mRnu2-10 | Scn2aB10 | hRNU6-1 | 1.66 | 1.52 | 1.7 | 1.63 | 0.10 | <0.001 |
| 10_Scn2aB10_ | | | | | | | | | | |
| hRNU6-1 | | | | | | | | | | |
| 335_mRnu1b1 | 335 | mRnu1b1 | Scn2aB10 | mRnu7 | 1.87 | 1.50 | 1.56 | 1.64 | 0.20 | <0.001 |
| Scn2aB10_ | | | | | | | | | | |
| mRnu7 | | | | | | | | | | |
| 330_mRnu1b1 | 330 | mRnu1b1 | Scn2aB10 | mRnu1b6 | 1.89 | 1.54 | 1.52 | 1.65 | 0.21 | <0.001 |
| Scn2aB10_ | | | | | | | | | | |
| mRnu1b6 | | | | | | | | | | |
| 352_mRnu1b6 | 352 | mRnu1b6 | Scn2aB10 | mRnu1b1 | 1.69 | 1.54 | 1.7 | 1.66 | 0.11 | <0.001 |
| Scn2aB10_ | | | | | | | | | | |
| mRnu1b1 | | | | | | | | | | |
| 382_mRnu2- | 382 | mRnu2-10 | Scn2aB10 | mRnu11 | 1.94 | 1.40 | 1.6 | 1.67 | 0.27 | <0.001 |
| 10_Scn2aB10_ | | | | | | | | | | |
| mRnu11 | | | | | | | | | | |
| 344_mRnu1b6 | 344 | mRnu1b6 | Scn2aB10 | hRNU4-1 | 0.99 | 1.58 | 2.44 | 1.67 | 0.73 | <0.001 |
| Scn2aB10_ | | | | | | | | | | |
| hRNU4-1 | | | | | | | | | | |
| 336_mRnu1b1 | 336 | mRnu1b1 | Scn2aB10 | mRnu11 | 1.89 | 1.41 | 1.74 | 1.68 | 0.25 | <0.001 |
| Scn2aB10_ | | | | | | | | | | |
| mRnu11 | | | | | | | | | | |
| 371_mRnu2- | 371 | mRnu2-10 | Scn2aB10 | hRNU11 | 1.87 | 1.55 | 1.62 | 1.68 | 0.17 | <0.001 |
| 10_Scn2aB10 | | | | | | | | | | |
| hRNU11 | | | | | | | | | | |
| 326_mRnu1b1 | 326 | mRnu1b1 | Scn2aB10 | hRNU12 | 1.43 | 1.89 | 1.82 | 1.71 | 0.24 | <0.001 |
| Scn2aB10_ | | | | | | | | | | |
| hRNU12 | | | | | | | | | | |
| 343_mRnu1b6 | 343 | mRnu1b6 | Scn2aB10 | hU3 | 2.11 | 1.39 | 1.65 | 1.72 | 0.36 | <0.001 |
| Scn2aB10_hU3 | | | | | | | | | | |
| 318_mRnu1b1 | 318 | mRnu1b1 | Scn2aB10 | hRNU1-3 | 1.84 | 1.63 | 1.69 | 1.72 | 0.11 | <0.001 |
| Scn2aB10_ | | | | | | | | | | |
| hRNU1-3 | | | | | | | | | | |
| 358_mRnu1b6 | 358 | mRnu1b6 | Scn2aB10 | mRnu7 | 1.88 | 1.56 | 1.75 | 1.73 | 0.16 | <0.001 |
| Scn2aB10_ | | | | | | | | | | |
| mRnu7 | | | | | | | | | | |
| 383_mRnu2- | 383 | mRnu2-10 | Scn2aB10 | mRnu12 | 2.04 | 1.43 | 1.73 | 1.73 | 0.31 | <0.001 |
| 10_Scn2aB10_ | | | | | | | | | | |
| mRnu12 | | | | | | | | | | |
| 308_mRnu1a1 | 308 | mRnu1a1 | Scn2aB10 | mRnu2-10 | 1.71 | 1.65 | 1.84 | 1.73 | 0.10 | <0.001 |
| Scn2aB10_ | | | | | | | | | | |
| mRnu2-10 | | | | | | | | | | |
| 376_mRnu2- | 376 | mRnu2-10 | Scn2aB10 | mRnu1b6 | 1.94 | 1.57 | 1.70 | 1.74 | 0.19 | <0.001 |
| 10_Scn2aB10_ | | | | | | | | | | |
| mRnu1b6 | | | | | | | | | | |
| 370_mRnu2- | 370 | mRnu2-10 | Scn2aB10 | RNU7-1 | 1.88 | 1.49 | 1.84 | 1.74 | 0.21 | <0.001 |
| 10_Scn2aB10_ | | | | | | | | | | |
| RNU7-1 | | | | | | | | | | |
| 333_mRnu1b1_ | 333 | mRnu1b1 | Scn2aB10 | mRnu5g | 2.13 | 1.39 | 1.73 | 1.75 | 0.37 | <0.001 |
| Scn2aB10_ | | | | | | | | | | |
| mRnu5g | | | | | | | | | | |
| 366_mRnu2- | 366 | mRnu2-10 | Scn2aB10 | hU3 | 1.88 | 1.63 | 1.76 | 1.76 | 0.13 | <0.001 |
| 10_Scn2aB10_ | | | | | | | | | | |
| hU3 | | | | | | | | | | |
| 321_mRnu1b1_ | 321 | mRnu1b1 | Scn2aB10 | hRNU4-1 | 1.99 | 1.55 | 1.74 | 1.76 | 0.22 | <0.001 |
| Scn2aB10_ | | | | | | | | | | |
| hRNU4-1 | | | | | | | | | | |
| 314_mRnu1a1_ | 314 | mRnu1a1 | Scn2aB10 | mRnu12 | 1.79 | 1.79 | 1.71 | 1.77 | 0.04 | <0.001 |
| Scn2aB10_ | | | | | | | | | | |
| mRnu12 | | | | | | | | | | |
| 389_mRnu3b1_ | 389 | mRnu3b1 | Scn2aB10 | hRNU1-1 | 1.87 | 1.76 | 1.75 | 1.79 | 0.07 | <0.001 |
| Scn2aB10_ | | | | | | | | | | |
| hRNU1-1 | | | | | | | | | | |
| 302_mRnu1a1_ | 302 | mRnu1a1 | Scn2aB10 | hRNU11 | 1.73 | 1.91 | 1.75 | 1.80 | 0.10 | <0.001 |
| Scn2aB10_ | | | | | | | | | | |
| hRNU11 | | | | | | | | | | |
| 393_mRnu3b1_ | 393 | mRnu3b1 | Scn2aB10 | hU3 | 1.86 | 1.95 | 1.59 | 1.80 | 0.18 | <0.001 |
| Scn2aB10_hU3 | | | | | | | | | | |
| 320_mRnu1b1_ | 320 | mRnu1b1 | Scn2aB10 | hU3 | 2.01 | 1.67 | 1.73 | 1.80 | 0.18 | <0.001 |
| Scn2aB10_hU3 | | | | | | | | | | |
| 364_mRnu2- | 364 | mRnu2-10 | Scn2aB10 | hRNU1-3 | 1.86 | 1.66 | 1.91 | 1.81 | 0.13 | <0.001 |
| 10_Scn2aB10_ | | | | | | | | | | |
| hRNU1-3 | | | | | | | | | | |
| 399_mRnu3b1_ | 399 | mRnu3b1 | Scn2aB10 | hRNU12 | 1.96 | 1.58 | 1.88 | 1.81 | 0.20 | <0.001 |
| Scn2aB10_ | | | | | | | | | | |
| hRNU12 | | | | | | | | | | |
| 365_mRnu2- | 365 | mRnu2-10 | Scn2aB10 | hRNU2-1 | 1.97 | 1.61 | 1.86 | 1.81 | 0.19 | <0.001 |
| 10_Scn2aB10_ | | | | | | | | | | |
| hRNU2-1 | | | | | | | | | | |
| 360_mRnu1b6_ | 360 | mRnu1b6 | Scn2aB10 | mRnu12 | 2.13 | 1.60 | 1.71 | 1.81 | 0.28 | <0.001 |
| Scn2aB10_ | | | | | | | | | | |
| mRnu12 | | | | | | | | | | |
| 349_mRnu1b6_ | 349 | mRnu1b6 | Scn2aB10 | hRNU12 | 2.05 | 1.49 | 1.91 | 1.82 | 0.29 | <0.001 |
| Scn2aB10_ | | | | | | | | | | |
| hRNU12 | | | | | | | | | | |
| 322_mRnu1b1_ | 322 | mRnu1b1 | Scn2aB10 | hRNU5A-1 | 2.57 | 1.59 | 1.29 | 1.82 | 0.67 | <0.001 |
| Scn2aB10_ | | | | | | | | | | |
| hRNU5A-1 | | | | | | | | | | |
| 397_mRnu3b1_ | 397 | mRnu3b1 | Scn2aB10 | RNU7-1 | 1.90 | 1.83 | 1.75 | 1.83 | 0.07 | <0.001 |
| Scn2aB10_ | | | | | | | | | | |
| RNU7-1 | | | | | | | | | | |
| 363_mRnu2- | 363 | mRnu2-10 | Scn2aB10 | hRNU1-2 | 2.10 | 1.55 | 1.86 | 1.83 | 0.27 | <0.001 |
| 10_Scn2aB10_ | | | | | | | | | | |
| hRNU1-2 | | | | | | | | | | |
| 375_mRnu2- | 375 | mRnu2-10 | Scn2aB10 | mRnu1b1 | 1.86 | 1.64 | 2.00 | 1.84 | 0.18 | <0.001 |
| 10_Scn2aB10_ | | | | | | | | | | |
| mRnu1b1 | | | | | | | | | | |
| 310_mRnu1a1_ | 310 | mRnu1a1 | Scn2aB10 | mRnu5g | 1.81 | 1.67 | 2.03 | 1.84 | 0.18 | <0.001 |
| Scn2aB10_ | | | | | | | | | | |
| mRnu5g | | | | | | | | | | |
| 305_mRnu1a1_ | 305 | mRnu1a1 | Scn2aB10 | mRnu1a1 | 1.87 | 1.74 | 1.90 | 1.84 | 0.09 | <0.001 |
| Scn2aB10_ | | | | | | | | | | |
| mRnu1a1 | | | | | | | | | | |
| 306_mRnu1a1_ | 306 | mRnu1a1 | Scn2aB10 | mRnu1b1 | 1.98 | 1.90 | 1.66 | 1.85 | 0.17 | <0.001 |
| Scn2aB10_ | | | | | | | | | | |
| mRnu1b1 | | | | | | | | | | |
| 391_mRnu3b1_ | 391 | mRnu3b1 | Scn2aB10 | hRNU1-3 | 1.96 | 1.76 | 1.88 | 1.87 | 0.10 | <0.001 |
| Scn2aB10_ | | | | | | | | | | |
| hRNU1-3 | | | | | | | | | | |
| 339_mRnu1b6_ | 339 | mRnu1b6 | Scn2aB10 | hRNU1-1 | 2.02 | 1.62 | 1.95 | 1.87 | 0.21 | <0.001 |
| Scn2aB10_ | | | | | | | | | | |
| hRNU1-1 | | | | | | | | | | |
| 341_mRnu1b6_ | 341 | mRnu1b6 | Scn2aB10 | hRNU1-3 | 2.19 | 1.55 | 1.86 | 1.87 | 0.32 | <0.001 |
| Scn2aB10_ | | | | | | | | | | |
| hRNU1-3 | | | | | | | | | | |
| 307_mRnu1a1_ | 307 | mRnu1a1 | Scn2aB10 | mRnu1b6 | 1.59 | 1.98 | 2.05 | 1.87 | 0.25 | <0.001 |
| Scn2aB10_ | | | | | | | | | | |
| mRnu1b6 | | | | | | | | | | |
| 392_mRnu3b1_ | 392 | mRnu3b1 | Scn2aB10 | hRNU2-1 | 2.08 | 1.62 | 1.93 | 1.88 | 0.24 | <0.001 |
| Scn2aB10_ | | | | | | | | | | |
| hRNU2-1 | | | | | | | | | | |
| 367_mRnu2- | 367 | mRnu2-10 | Scn2aB10 | hRNU4-1 | 2.19 | 1.66 | 1.79 | 1.88 | 0.28 | <0.001 |
| 10_Scn2aB10_ | | | | | | | | | | |
| hRNU4-1 | | | | | | | | | | |
| 312_mRnu1a1_ | 312 | mRnu1a1 | Scn2aB10 | mRnu7 | 2.34 | 1.69 | 1.69 | 1.91 | 0.37 | <0.001 |
| Scn2aB10_ | | | | | | | | | | |
| mRnu7 | | | | | | | | | | |
| 328_mRnu1b1_ | 328 | mRnu1b1 | Scn2aB10 | mRnu1a1 | 2.35 | 1.72 | 1.65 | 1.91 | 0.39 | <0.001 |
| Scn2aB10__ | | | | | | | | | | |
| mRnu1a1 | | | | | | | | | | |
| 388_mu1a1_ | 388 | mu1a1 | Scn2aB10 | U1 | 2.19 | 1.70 | 1.86 | 1.92 | 0.25 | <0.001 |
| Scn2aB10_U1 | | | | | | | | | | |
| 348_mRnu1b6_ | 348 | mRnu1b6 | Scn2aB10 | hRNU11 | 2.10 | 1.7 | 2.03 | 1.95 | 0.19 | <0.001 |
| Scn2aB10_ | | | | | | | | | | |
| hRNU11 | | | | | | | | | | |
| 401_mRnu3b1_ | 401 | mRnu3b1 | Scn2aB10 | mRnu1a1 | 2.15 | 1.73 | 1.98 | 1.96 | 0.21 | <0.001 |
| Scn2aB10_ | | | | | | | | | | |
| mRnu1a1 | | | | | | | | | | |
| 340_mRnu1b6_ | 340 | mRnu1b6 | Scn2aB10 | hRNU1-2 | 2.09 | 1.67 | 2.12 | 1.96 | 0.25 | <0.001 |
| Scn2aB10_ | | | | | | | | | | |
| hRNU1-2 | | | | | | | | | | |
| 362_mRnu2- | 362 | mRnu2-10 | Scn2aB10 | hRNU1-1 | 2.40 | 1.73 | 1.77 | 1.97 | 0.38 | <0.001 |
| 10_Scn2aB10_ | | | | | | | | | | |
| hRNU1-1 | | | | | | | | | | |
| 359_mRnu1b6_ | 359 | mRnu1b6 | Scn2aB10 | mRnu11 | 2.10 | 1.74 | 2.11 | 1.98 | 0.21 | <0.001 |
| Scn2aB10_ | | | | | | | | | | |
| mRnu11 | | | | | | | | | | |
| 353_mRnu1b6_ | 353 | mRnu1b6 | Scn2aB10 | mRnu1b6 | 2.22 | 1.72 | 2.0 | 1.98 | 0.25 | <0.001 |
| Scn2aB10_ | | | | | | | | | | |
| mRnu1b6 | | | | | | | | | | |
| 329_mRnu1b1_ | 329 | mRnu1b1 | Scn2aB10 | mRnu1b1 | 2.25 | 1.79 | 1.93 | 1.99 | 0.24 | <0.001 |
| Scn2aB10_ | | | | | | | | | | |
| mRnu1b1 | | | | | | | | | | |
| 303_mRnu1a1_ | 303 | mRnu1a1 | Scn2aB10 | hRNU12 | 2.04 | 1.81 | 2.23 | 2.03 | 0.21 | <0.001 |
| Scn2aB10_ | | | | | | | | | | |
| hRNU12 | | | | | | | | | | |
| 377_mRnu2- | 377 | mRnu2-10 | Scn2aB10 | mRnu2-10 | 2.08 | 1.88 | 2.12 | 2.03 | 0.13 | <0.001 |
| 10_Scn2aB10_ | | | | | | | | | | |
| mRnu2-10 | | | | | | | | | | |
| 313_mRnu1a1_ | 313 | mRnu1a1 | Scn2aB10 | mRnu11 | 2.34 | 1.74 | 2.03 | 2.04 | 0.30 | <0.001 |
| Scn2aB10_ | | | | | | | | | | |
| mRnu11 | | | | | | | | | | |
| 345_mRnu1b6_ | 345 | mRnu1b6 | Scn2aB10 | hRNU5A-1 | 2.23 | 1.91 | 2.07 | 2.07 | 0.16 | <0.001 |
| Scn2aB10_ | | | | | | | | | | |
| hRNU5A-1 | | | | | | | | | | |
| 394_mRnu3b1_ | 394 | mRnu3b1 | Scn2aB10 | hRNU4-1 | 2.25 | 1.92 | 2.08 | 2.08 | 0.16 | <0.001 |
| Scn2aB10_ | | | | | | | | | | |
| hRNU4-1 | | | | | | | | | | |
| 368_mRnu2- | 368 | mRnu2-10 | Scn2aB10 | hRNU5A-1 | 2.50 | 1.93 | 1.86 | 2.10 | 0.35 | <0.001 |
| 10_Scn2aB10_ | | | | | | | | | | |
| hRNU5A-1 | | | | | | | | | | |
| 374_mRnu2- | 374 | mRnu2-10 | Scn2aB10 | mRnu1a1 | 2.25 | 1.72 | 2.39 | 2.12 | 0.36 | <0.001 |
| 10_Scn2aB10_ | | | | | | | | | | |
| mRnu1a1 | | | | | | | | | | |
| 398_mRnu3b1_ | 398 | mRnu3b1 | Scn2aB10 | hRNU11 | 2.18 | 2.14 | 2.07 | 2.13 | 0.06 | <0.001 |
| Scn2aB10_ | | | | | | | | | | |
| hRNU11 | | | | | | | | | | |
| 372_mRnu2- | 372 | mRnu2-10 | Scn2aB10 | hRNU12 | 2.43 | 1.77 | 2.29 | 2.16 | 0.35 | <0.001 |
| 10_Scn2aB10_ | | | | | | | | | | |
| hRNU12 | | | | | | | | | | |
| 390_mRnu3b1_ | 390 | mRnu3b1 | Scn2aB10 | hRNU1-2 | 2.39 | 1.89 | 2.24 | 2.17 | 0.25 | <0.001 |
| Scn2aB10_ | | | | | | | | | | |
| hRNU1-2 | | | | | | | | | | |
| 379_mRnu2- | 379 | mRnu2-10 | Scn2aB10 | mRnu5g | 2.69 | 1.85 | 1.98 | 2.17 | 0.45 | <0.001 |
| 10_Scn2aB10_ | | | | | | | | | | |
| mRnu5g | | | | | | | | | | |
| 395_mRnu3b1_ | 395 | mRnu3b1 | Scn2aB10 | hRNU5A-1 | 1.88 | 2.25 | 2.68 | 2.27 | 0.40 | <0.001 |
| Scn2aB10_ | | | | | | | | | | |
| hRNU5A-1 | | | | | | | | | | |

TABLE 12
Library 5 Summary

| | | | | | | | | | | P-value |
|---|---|---|---|---|---|---|---|---|---|---|
| Name | ID | Promoter | U7 | Terminator | Rep1 | Rep2 | Rep3 | Average | SD | (ANOVA) |
| 448_mRnu6_ | 448 | mRnu6 | Scn2aB10 | mRnu1b1 | 0.74 | 0.82 | 0.82 | 0.79 | 0.05 | 0.28 |
| Scn2aB10_ | | | | | | | | | | |
| mRnu1b1 | | | | | | | | | | |
| 444_mRnu6_ | 444 | mRnu6 | Scn2aB10 | hRNU11 | 0.84 | 0.74 | 0.90 | 0.83 | 0.08 | 0.40 |
| Scn2aB10_ | | | | | | | | | | |
| hRNU11 | | | | | | | | | | |
| 446_mRnu6_ | 446 | mRnu6 | Scn2aB10 | hRN7SK | 0.80 | 0.91 | 0.86 | 0.86 | 0.05 | 0.54 |
| Scn2aB10_ | | | | | | | | | | |
| hRN7SK | | | | | | | | | | |
| 454_mRnu6 | 454 | mRnu6 | Scn2aB10 | mRnu7 | 0.85 | 0.90 | 0.82 | 0.86 | 0.04 | 0.54 |
| Scn2aB10_ | | | | | | | | | | |
| mRnu7 | | | | | | | | | | |
| 442_mRnu6_ | 442 | mRnu6 | Scn2aB10 | hRNU6-1 | 0.80 | 0.88 | 0.91 | 0.86 | 0.05 | 0.58 |
| Scn2aB10_ | | | | | | | | | | |
| hRNU6-1 | | | | | | | | | | |
| 457_mRnu6_ | 457 | mRnu6 | Scn2aB10 | mRn7sk | 0.82 | 0.97 | 0.91 | 0.90 | 0.07 | 0.78 |
| Scn2aB10_ | | | | | | | | | | |
| mRn7sk | | | | | | | | | | |
| 450_mRnu6_ | 450 | mRnu6 | Scn2aB10 | mRnu2-10 | 0.88 | 0.96 | 0.88 | 0.91 | 0.04 | 0.82 |
| Scn2aB10_ | | | | | | | | | | |
| mRnu2-10 | | | | | | | | | | |
| 449_mRnu6_ | 449 | mRnu6 | Scn2aB10 | mRnu1b6 | 0.95 | 0.92 | 0.89 | 0.92 | 0.03 | 0.90 |
| Scn2aB10_ | | | | | | | | | | |
| mRnu1b6 | | | | | | | | | | |
| 436_mRnu6_ | 436 | mRnu6 | Scn2aB10 | hRNU1-2 | 0.89 | 0.97 | 0.90 | 0.92 | 0.05 | 0.90 |
| Scn2aB10_ | | | | | | | | | | |
| hRNU1-2 | | | | | | | | | | |
| 455_mRnu6_ | 455 | mRnu6 | Scn2aB10 | mRnu11 | 0.89 | 0.85 | 1.02 | 0.92 | 0.09 | 0.90 |
| Scn2aB10_ | | | | | | | | | | |
| mRnu11 | | | | | | | | | | |
| 482 mu1a1 | 482 | mu1a1 | Scr2 | U1 | 1.02 | 0.93 | 0.86 | 0.94 | 0.08 | Control |
| Scr2_U1 | | | | | | | | | | |
| 445_mRnu6_ | 445 | mRnu6 | Scn2aB10 | hRNU12 | 0.86 | 1.01 | 0.95 | 0.94 | 0.07 | 0.98 |
| Scn2aB10_ | | | | | | | | | | |
| hRNU12 | | | | | | | | | | |
| 451_mRnu6_ | 451 | mRnu6 | Scn2aB10 | mRnu3b1 | 0.81 | 0.94 | 1.15 | 0.97 | 0.17 | 0.82 |
| Scn2aB10_ | | | | | | | | | | |
| mRnu3b1 | | | | | | | | | | |
| 452_mRnu6_ | 452 | mRnu6 | Scn2aB10 | mRnu5g | 1.07 | 0.91 | 0.93 | 0.97 | 0.09 | 0.80 |
| Scn2aB10_ | | | | | | | | | | |
| mRnu5g | | | | | | | | | | |
| 447_mRnu6_ | 447 | mRnu6 | Scn2aB10 | mRnu1a1 | 1.08 | 0.91 | 0.93 | 0.97 | 0.09 | 0.78 |
| Scn2aB10_ | | | | | | | | | | |
| mRnu1a1 | | | | | | | | | | |
| 440_mRnu6_ | 440 | mRnu6 | Scn2aB10 | hRNU4-1 | 1.05 | 1.02 | 0.94 | 1.01 | 0.06 | 0.61 |
| Scn2aB10_ | | | | | | | | | | |
| hRNU4-1 | | | | | | | | | | |
| 456_mRnu6_ | 456 | mRnu6 | Scn2aB10 | mRnu12 | 1.01 | 1.12 | 0.89 | 1.01 | 0.12 | 0.59 |
| Scn2aB10_ | | | | | | | | | | |
| mRnu12 | | | | | | | | | | |
| 443_mRnu6_ | 443 | mRnu6 | Scn2aB10 | RNU7-1 | 0.84 | 1.29 | 0.96 | 1.03 | 0.24 | 0.48 |
| Scn2aB10_ | | | | | | | | | | |
| RNU7-1 | | | | | | | | | | |
| 435_mRnu6_ | 435 | mRnu6 | Scn2aB10 | hRNU1-1 | 0.93 | 1.00 | 1.18 | 1.04 | 0.13 | 0.45 |
| Scn2aB10_ | | | | | | | | | | |
| hRNU1-1 | | | | | | | | | | |
| 438_mRnu6_ | 438 | mRnu6 | Scn2aB10 | hRNU2-1 | 0.95 | 1.30 | 0.92 | 1.06 | 0.21 | 0.36 |
| Scn2aB10_ | | | | | | | | | | |
| hRNU2-1 | | | | | | | | | | |
| 439_mRnu6_ | 439 | mRnu6 | Scn2aB10 | hU3 | 1.07 | 1.14 | 0.98 | 1.06 | 0.08 | 0.34 |
| Scn2aB10_hU3 | | | | | | | | | | |
| 481_mu1a1_ | 481 | mu1a1 | Scn2aF1Scr2 | U1 | 0.98 | 1.07 | 1.14 | 1.06 | 0.08 | 0.34 |
| Scn2aF1Scr2_ | | | | | | | | | | |
| U1 | | | | | | | | | | |
| 437_mRnu6_ | 437 | mRnu6 | Scn2aB10 | hRNU1-3 | 1.01 | 1.09 | 1.11 | 1.07 | 0.05 | 0.31 |
| Scn2aB10_ | | | | | | | | | | |
| hRNU1-3 | | | | | | | | | | |
| 441_mRnu6_ | 441 | mRnu6 | Scn2aB10 | hRNU5A-1 | 1.23 | 1.04 | 0.97 | 1.08 | 0.13 | 0.28 |
| Scn2aB10_ | | | | | | | | | | |
| hRNU5A-1 | | | | | | | | | | |
| 419_mRnu5g_ | 419 | mRnu5g | Scn2aB10 | hRNU6-1 | 1.10 | 1.11 | 1.21 | 1.14 | 0.06 | 0.12 |
| Scn2aB10_ | | | | | | | | | | |
| hRNU6-1 | | | | | | | | | | |
| 500_mRnu11_ | 500 | mRnu11 | Scn2aB10 | mRnu2-10 | 1.26 | 1.16 | 1.08 | 1.17 | 0.09 | 0.08 |
| Scn2aB10_ | | | | | | | | | | |
| mRnu2-10 | | | | | | | | | | |
| 492_mRnu11 | 492 | mRnu11 | Scn2aB10 | hRNU6-1 | 1.29 | 1.29 | 0.97 | 1.18 | 0.18 | 0.06 |
| Scn2aB10_ | | | | | | | | | | |
| hRNU6-1 | | | | | | | | | | |
| 420_mRnu5g_ | 420 | mRnu5g | Scn2aB10 | RNU7-1 | 1.27 | 1.15 | 1.23 | 1.22 | 0.06 | 0.03 |
| Scn2aB10_ | | | | | | | | | | |
| RNU7-1 | | | | | | | | | | |
| 465_mRnu7_ | 465 | mRnu7 | Scn2aB10 | hRNU6-1 | 1.16 | 1.43 | 1.09 | 1.23 | 0.18 | 0.03 |
| Scn2aB10_ | | | | | | | | | | |
| hRNU6-1 | | | | | | | | | | |
| 477_mRnu7_ | 477 | mRnu7 | Scn2aB10 | mRnu7 | 1.10 | 1.34 | 1.34 | 1.26 | 0.14 | 0.01 |
| Scn2aB10_ | | | | | | | | | | |
| mRnu7 | | | | | | | | | | |
| 470_mRnu7_ | 470 | mRnu7 | Scn2aB10 | mRnu1a1 | 1.24 | 1.18 | 1.36 | 1.26 | 0.09 | 0.01 |
| Scn2aB10_ | | | | | | | | | | |
| mRnu1a1 | | | | | | | | | | |
| 428_mRnu5g_ | 428 | mRnu5g | Scn2aB10 | mRnu3b1 | 1.33 | 1.17 | 1.29 | 1.26 | 0.08 | 0.01 |
| Scn2aB10_ | | | | | | | | | | |
| mRnu3b1 | | | | | | | | | | |
| 474_mRnu7_ | 474 | mRnu7 | Scn2aB10 | mRnu3b1 | 1.23 | 1.45 | 1.18 | 1.29 | 0.14 | 0.008 |
| Scn2aB10_ | | | | | | | | | | |
| mRnu3b1 | | | | | | | | | | |
| 421_mRnu5g_ | 421 | mRnu5g | Scn2aB10 | hRNU11 | 1.30 | 1.22 | 1.35 | 1.29 | 0.06 | 0.008 |
| Scn2aB10_ | | | | | | | | | | |
| hRNU11 | | | | | | | | | | |
| 469_mRnu7_ | 469 | mRnu7 | Scn2aB10 | hRN7SK | 1.33 | 1.24 | 1.34 | 1.31 | 0.05 | 0.006 |
| Scn2aB10_ | | | | | | | | | | |
| hRN7SK | | | | | | | | | | |
| 473_mRnu7_ | 473 | mRnu7 | Scn2aB10 | mRnu2-10 | 1.31 | 1.19 | 1.44 | 1.31 | 0.12 | 0.005 |
| Scn2aB10_ | | | | | | | | | | |
| mRnu2-10 | | | | | | | | | | |
| 462_mRnu7_ | 462 | mRnu7 | Scn2aB10 | hU3 | 1.33 | 1.39 | 1.23 | 1.32 | 0.08 | 0.004 |
| Scn2aB10_hU3 | | | | | | | | | | |
| 431_mRnu5g_ | 431 | mRnu5g | Scn2aB10 | mRnu7 | 1.19 | 1.39 | 1.42 | 1.34 | 0.12 | 0.003 |
| Scn2aB10_ | | | | | | | | | | |
| mRnu7 | | | | | | | | | | |
| 493_mRnu11_ | 493 | mRnu11 | Scn2aB10 | RNU7-1 | 1.20 | 1.46 | 1.40 | 1.35 | 0.14 | 0.002 |
| Scn2aB10_ | | | | | | | | | | |
| RNU7-1 | | | | | | | | | | |
| 427_mRnu5g_ | 427 | mRnu5g | Scn2aB10 | mRnu2-10 | 1.50 | 0.94 | 1.65 | 1.36 | 0.38 | 0.001 |
| Scn2aB10_ | | | | | | | | | | |
| mRnu2-10 | | | | | | | | | | |
| 501_mRnu11_ | 501 | mRnu11 | Scn2aB10 | mRnu3b1 | 1.37 | 1.55 | 1.19 | 1.37 | 0.18 | 0.001 |
| Scn2aB10_ | | | | | | | | | | |
| mRnu3b1 | | | | | | | | | | |
| 425_mRnu5g_ | 425 | mRnu5g | Scn2aB10 | mRnu1b1 | 1.21 | 1.45 | 1.45 | 1.37 | 0.14 | 0.001 |
| Scn2aB10_ | | | | | | | | | | |
| mRnu1b1 | | | | | | | | | | |
| 461_mRnu7_ | 461 | mRnu7 | Scn2aB10 | hRNU2-1 | 1.33 | 1.39 | 1.40 | 1.37 | 0.04 | 0.001 |
| Scn2aB10_ | | | | | | | | | | |
| hRNU2-1 | | | | | | | | | | |
| 424_mRnu5g_ | 424 | mRnu5g | Scn2aB10 | mRnu1a1 | 1.35 | 1.43 | 1.39 | 1.39 | 0.04 | <0.001 |
| Scn2aB10__ | | | | | | | | | | |
| mRnu1a1 | | | | | | | | | | |
| 472_mRnu7_ | 472 | mRnu7 | Scn2aB10 | mRnu1b6 | 1.30 | 1.47 | 1.42 | 1.39 | 0.09 | <0.001 |
| Scn2aB10_ | | | | | | | | | | |
| mRnu1b6 | | | | | | | | | | |
| 499_mRnu11_ | 499 | mRnu11 | Scn2aB10 | mRnu1b6 | 1.28 | 1.24 | 1.66 | 1.39 | 0.23 | <0.001 |
| Scn2aB10_ | | | | | | | | | | |
| mRnu1b6 | | | | | | | | | | |
| 402_mRnu3b1_ | 402 | mRnu3b1 | Scn2aB10 | mRnu1b1 | 1.30 | 1.47 | 1.46 | 1.41 | 0.09 | <0.001 |
| Scn2aB10_ | | | | | | | | | | |
| mRnu1b1 | | | | | | | | | | |
| 432_mRnu5g_ | 432 | mRnu5g | Scn2aB10 | mRnu11 | 1.23 | 1.57 | 1.44 | 1.41 | 0.17 | <0.001 |
| Scn2aB10_ | | | | | | | | | | |
| mRnu11 | | | | | | | | | | |
| 414_mRnu5g_ | 414 | mRnu5g | Scn2aB10 | hRNU1-3 | 1.26 | 1.38 | 1.61 | 1.41 | 0.18 | <0.001 |
| Scn2aB10_ | | | | | | | | | | |
| hRNU1-3 | | | | | | | | | | |
| 423_mRnu5g_ | 423 | mRnu5g | Scn2aB10 | hRN7SK | 1.32 | 1.66 | 1.27 | 1.42 | 0.21 | <0.001 |
| Scn2aB10_ | | | | | | | | | | |
| hRN7SK | | | | | | | | | | |
| 434_mRnu5g_ | 434 | mRnu5g | Scn2aB10 | mRn7sk | 1.49 | 1.30 | 1.51 | 1.43 | 0.12 | <0.001 |
| Scn2aB10_ | | | | | | | | | | |
| mRn7sk | | | | | | | | | | |
| 466_mRnu7_ | 466 | mRnu7 | Scn2aB10 | RNU7-1 | 1.16 | 1.85 | 1.29 | 1.44 | 0.37 | <0.001 |
| Scn2aB10_ | | | | | | | | | | |
| RNU7-1 | | | | | | | | | | |
| 412_mRnu5g_ | 412 | mRnu5g | Scn2aB10 | hRNU1-1 | 1.38 | 1.56 | 1.43 | 1.46 | 0.09 | <0.001 |
| Scn2aB10_ | | | | | | | | | | |
| hRNU1-1 | | | | | | | | | | |
| 411_mRnu3b1_ | 411 | mRnu3b1 | Scn2aB10 | mRn7sk | 1.42 | 1.42 | 1.54 | 1.46 | 0.07 | <0.001 |
| Scn2aB10_ | | | | | | | | | | |
| mRn7sk | | | | | | | | | | |
| 479_mRnu7 | 479 | mRnu7 | Scn2aB10 | mRnu12 | 1.45 | 1.51 | 1.45 | 1.47 | 0.03 | <0.001 |
| Scn2aB10_ | | | | | | | | | | |
| mRnu12 | | | | | | | | | | |
| 498_mRnu11_ | 498 | mRnu11 | Scn2aB10 | mRnu1b1 | 1.38 | 1.65 | 1.39 | 1.47 | 0.15 | <0.001 |
| Scn2aB10_ | | | | | | | | | | |
| mRnu1b1 | | | | | | | | | | |
| 429_mRnu5g_ | 429 | mRnu5g | Scn2aB10 | mRnu5g | 1.58 | 1.35 | 1.52 | 1.48 | 0.12 | <0.001 |
| Scn2aB10_ | | | | | | | | | | |
| mRnu5g | | | | | | | | | | |
| 433_mRnu5g_ | 433 | mRnu5g | Scn2aB10 | mRnu12 | 1.51 | 1.45 | 1.50 | 1.49 | 0.03 | <0.001 |
| Scn2aB10_ | | | | | | | | | | |
| mRnu12 | | | | | | | | | | |
| 471_mRnu7_ | 471 | mRnu7 | Scn2aB10 | mRnu1b1 | 1.52 | 1.33 | 1.63 | 1.49 | 0.15 | <0.001 |
| Scn2aB10_ | | | | | | | | | | |
| mRnu1b1 | | | | | | | | | | |
| 458_mRnu7_ | 458 | mRnu7 | Scn2aB10 | hRNU1-1 | 1.43 | 1.68 | 1.38 | 1.50 | 0.16 | <0.001 |
| Scn2aB10_ | | | | | | | | | | |
| hRNU1-1 | | | | | | | | | | |
| 459_mRnu7_ | 459 | mRnu7 | Scn2aB10 | hRNU1-2 | 1.36 | 1.73 | 1.40 | 1.50 | 0.20 | <0.001 |
| Scn2aB10_ | | | | | | | | | | |
| hRNU1-2 | | | | | | | | | | |
| 478_mRnu7_ | 478 | mRnu7 | Scn2aB10 | mRnu11 | 1.54 | 1.35 | 1.61 | 1.50 | 0.13 | <0.001 |
| Scn2aB10_ | | | | | | | | | | |
| mRnu11 | | | | | | | | | | |
| 417_mRnu5g_ | 417 | mRnu5g | Scn2aB10 | hRNU4-1 | 1.22 | 1.60 | 1.70 | 1.51 | 0.25 | <0.001 |
| Scn2aB10_ | | | | | | | | | | |
| hRNU4-1 | | | | | | | | | | |
| 422_mRnu5g_ | 422 | mRnu5g | Scn2aB10 | hRNU12 | 1.43 | 1.57 | 1.56 | 1.52 | 0.08 | <0.001 |
| Scn2aB10_ | | | | | | | | | | |
| hRNU12 | | | | | | | | | | |
| 496_mRnu11_ | 496 | mRnu11 | Scn2aB10 | hRN7SK | 1.57 | 1.39 | 1.63 | 1.53 | 0.12 | <0.001 |
| Scn2aB10_ | | | | | | | | | | |
| hRN7SK | | | | | | | | | | |
| 416_mRnu5g_ | 416 | mRnu5g | Scn2aB10 | hU3 | 1.40 | 1.44 | 1.76 | 1.53 | 0.19 | <0.001 |
| Scn2aB10_hU3 | | | | | | | | | | |
| 408_mRnu3b1_ | 408 | mRnu3b1 | Scn2aB10 | mRnu7 | 1.28 | 1.65 | 1.67 | 1.54 | 0.22 | <0.001 |
| Scn2aB10_ | | | | | | | | | | |
| mRnu7 | | | | | | | | | | |
| 486_mRnu11_ | 486 | mRnu11 | Scn2aB10 | hRNU1-2 | 1.34 | 1.64 | 1.64 | 1.54 | 0.17 | <0.001 |
| Scn2aB10_ | | | | | | | | | | |
| hRNU1-2 | | | | | | | | | | |
| 475_mRnu7_ | 475 | mRnu7 | Scn2aB10 | mRnu5g | 1.53 | 1.6 | 1.46 | 1.55 | 0.11 | <0.001 |
| Scn2aB10_ | | | | | | | | | | |
| mRnu5g | | | | | | | | | | |
| 491_mRnu11_ | 491 | mRnu11 | Scn2aB10 | hRNU5A-1 | 1.43 | 1.71 | 1.55 | 1.56 | 0.14 | <0.001 |
| Scn2aB10_ | | | | | | | | | | |
| hRNU5A-1 | | | | | | | | | | |
| 460_mRnu7_ | 460 | mRnu7 | Scn2aB10 | hRNU1-3 | 1.37 | 1.73 | 1.63 | 1.58 | 0.18 | <0.001 |
| Scn2aB10_ | | | | | | | | | | |
| hRNU1-3 | | | | | | | | | | |
| 410_mRnu3b1_ | 410 | mRnu3b1 | Scn2aB10 | mRnu12 | 1.54 | 1.54 | 1.66 | 1.58 | 0.07 | <0.001 |
| Scn2aB10_ | | | | | | | | | | |
| mRnu12 | | | | | | | | | | |
| 494_mRnu11_ | 494 | mRnu11 | Scn2aB10 | hRNU11 | 1.60 | 1.7 | 1.60 | 1.63 | 0.0 | <0.001 |
| Scn2aB10_ | | | | | | | | | | |
| hRNU11 | | | | | | | | | | |
| 467_mRnu7_ | 467 | mRnu7 | Scn2aB10 | hRNU11 | 1.66 | 1.65 | 1.68 | 1.66 | 0.02 | <0.001 |
| Scn2aB10_ | | | | | | | | | | |
| hRNU11 | | | | | | | | | | |
| 485_mRnu11_ | 485 | mRnu11 | Scn2aB10 | hRNU1-1 | 1.38 | 1.84 | 1.79 | 1.67 | 0.25 | <0.001 |
| Scn2aB10_ | | | | | | | | | | |
| hRNU1-1 | | | | | | | | | | |
| 490_mRnu11_ | 490 | mRnu11 | Scn2aB10 | hRNU4-1 | 1.65 | 1.84 | 1.52 | 1.67 | 0.16 | <0.001 |
| Scn2aB10_ | | | | | | | | | | |
| hRNU4-1 | | | | | | | | | | |
| 413_mRnu5g_ | 413 | mRnu5g | Scn2aB10 | hRNU1-2 | 1.71 | 2.00 | 1.34 | 1.68 | 0.34 | <0.001 |
| Scn2aB10_ | | | | | | | | | | |
| hRNU1-2 | | | | | | | | | | |
| 409_mRnu3b1_ | 409 | mRnu3b1 | Scn2aB10 | mRnu11 | 1.50 | 1.66 | 1.89 | 1.69 | 0.20 | <0.001 |
| Scn2aB10_ | | | | | | | | | | |
| mRnu11 | | | | | | | | | | |
| 488_mRnu11_ | 488 | mRnu11 | Scn2aB10 | hRNU2-1 | 1.75 | 1.78 | 1.59 | 1.71 | 0.10 | <0.001 |
| Scn2aB10_ | | | | | | | | | | |
| hRNU2-1 | | | | | | | | | | |
| 495_mRnu11_ | 495 | mRnu11 | Scn2aB10 | hRNU12 | 1.92 | 1.81 | 1.44 | 1.72 | 0.25 | <0.001 |
| Scn2aB10_ | | | | | | | | | | |
| hRNU12 | | | | | | | | | | |
| 415_mRnu5g_ | 415 | mRnu5g | Scn2aB10 | hRNU2-1 | 1.80 | 1.83 | 1.58 | 1.74 | 0.14 | <0.001 |
| Scn2aB10_ | | | | | | | | | | |
| hRNU2-1 | | | | | | | | | | |
| 426_mRnu5g_ | 426 | mRnu5g | Scn2aB10 | mRnu1b6 | 1.69 | 1.84 | 1.69 | 1.74 | 0.08 | <0.001 |
| Scn2aB10_ | | | | | | | | | | |
| mRnu1b6 | | | | | | | | | | |
| 483 mu1a1_ | 483 | mu1a1 | Scn2aD12 | U1 | 2.02 | 1.74 | 1.47 | 1.74 | 0.27 | <0.001 |
| Scn2aD12_U1 | | | | | | | | | | |
| 484 mu1a1_ | 484 | mu1a1 | Scn2aB10 | U1 | 1.66 | 1.78 | 1.82 | 1.76 | 0.09 | <0.001 |
| Scn2aB10_U1 | | | | | | | | | | |
| 464_mRnu7_ | 464 | mRnu7 | Scn2aB10 | hRNU5A-1 | 1.73 | 1.81 | 1.82 | 1.79 | 0.05 | <0.001 |
| Scn2aB10_ | | | | | | | | | | |
| hRNU5A-1 | | | | | | | | | | |
| 463_mRnu7_ | 463 | mRnu7 | Scn2aB10 | hRNU4-1 | 1.63 | 2.01 | 1.83 | 1.82 | 0.19 | <0.001 |
| Scn2aB10_ | | | | | | | | | | |
| hRNU4-1 | | | | | | | | | | |
| 406_mRnu3b1_ | 406 | mRnu3b1 | Scn2aB10 | mRnu5g | 1.75 | 2.03 | 1.72 | 1.83 | 0.17 | <0.001 |
| Scn2aB10_ | | | | | | | | | | |
| mRnu5g | | | | | | | | | | |
| 468_mRnu7_ | 468 | mRnu7 | Scn2aB10 | hRNU12 | 1.36 | 2.21 | 1.94 | 1.84 | 0.44 | <0.001 |
| Scn2aB10_ | | | | | | | | | | |
| hRNU12 | | | | | | | | | | |
| 405_mRnu3b1_ | 405 | mRnu3b1 | Scn2aB10 | mRnu3b1 | 1.72 | 1.75 | 2.10 | 1.86 | 0.21 | <0.001 |
| Scn2aB10_ | | | | | | | | | | |
| mRnu3b1 | | | | | | | | | | |
| 404_mRnu3b1_ | 404 | mRnu3b1 | Scn2aB10 | mRnu2-10 | 1.56 | 2.19 | 1.96 | 1.90 | 0.32 | <0.001 |
| Scn2aB10_ | | | | | | | | | | |
| mRnu2-10 | | | | | | | | | | |
| 418_mRnu5g_ | 418 | mRnu5g | Scn2aB10 | hRNU5A-1 | 1.68 | 2.71 | 1.63 | 2.01 | 0.61 | <0.001 |
| Scn2aB10_ | | | | | | | | | | |
| hRNU5A-1 | | | | | | | | | | |

TABLE 13
Library 6 Summary

| | | | | | | | | | | ANOVA |
|---|---|---|---|---|---|---|---|---|---|---|
| Name | ID | Promoter | U7 | Terminator | Rep1 | Rep2 | Rep3 | Average | SD | P-value |
| 2A12_194_ | 194 | mu1a1 | Scr2 | U1 | 0.83 | 0.81 | 0.82 | 0.82 | 0.01 | 0.24 |
| mu1a1_Scr2_U1 | | | | | | | | | | |
| 530_mRnu12_ | 530 | mRnu12 | Scn2aB10 | mRn7sk | 0.96 | 0.78 | 0.94 | 0.89 | 0.10 | 0.55 |
| Scn2aB10_ | | | | | | | | | | |
| mRn7sk | | | | | | | | | | |
| 515_mRnu12_ | 515 | mRnu12 | Scn2aB10 | hRNU6-1 | 0.92 | 0.88 | 0.95 | 0.92 | 0.03 | 0.68 |
| Scn2aB10_ | | | | | | | | | | |
| hRNU6-1 | | | | | | | | | | |
| 546_mRn7sk_ | 546 | mRn7sk | Scn2aB10 | mRnu2-10 | 0.73 | 1.05 | 1.10 | 0.96 | 0.20 | 0.94 |
| Scn2aB10_ | | | | | | | | | | |
| mRnu2-10 | | | | | | | | | | |
| 2H11_193_ | 193 | mu1a1 | Scn2aF1Scr2 | U1 | 1.03 | 0.86 | 1.02 | 0.97 | 0.10 | Control |
| mu1a1_ | | | | | | | | | | |
| Scn2aF1Scr2_U1 | | | | | | | | | | |
| 535_mRn7sk | 535 | mRn7sk | Scn2aB10 | hU3 | 1.08 | 1.06 | 0.99 | 1.04 | 0.04 | 0.57 |
| Scn2aB10_hU3 | | | | | | | | | | |
| 542_mRn7sk_ | 542 | mRn7sk | Scn2aB10 | hRN7SK | 1.05 | 1.03 | 1.11 | 1.06 | 0.05 | 0.47 |
| Scn2aB10_ | | | | | | | | | | |
| hRN7SK | | | | | | | | | | |
| 548_mRn7sk_ | 548 | mRn7sk | Scn2aB10 | mRnu5g | 1.08 | 0.95 | 1.20 | 1.07 | 0.12 | 0.4 |
| Scn2aB10_ | | | | | | | | | | |
| mRnu5g | | | | | | | | | | |
| 524_mRnu12_ | 524 | mRnu12 | Scn2aB10 | mRnu3b1 | 1.21 | 0.97 | 1.09 | 1.09 | 0.12 | 0.35 |
| Scn2aB10_ | | | | | | | | | | |
| mRnu3b1 | | | | | | | | | | |
| 539_mRn7sk_ | 539 | mRn7sk | Scn2aB10 | RNU7-1 | 1.16 | 0.83 | 1.27 | 1.09 | 0.23 | 0.36 |
| Scn2aB10_ | | | | | | | | | | |
| RNU7-1 | | | | | | | | | | |
| 534_mRn7sk_ | 534 | mRn7sk | Scn2aB10 | hRNU2-1 | 1.27 | 0.90 | 1.12 | 1.09 | 0.19 | 0.32 |
| Scn2aB10_ | | | | | | | | | | |
| hRNU2-1 | | | | | | | | | | |
| 545_mRn7sk_ | 545 | mRn7sk | Scn2aB10 | mRnu1b6 | 1.39 | 1.14 | 0.80 | 1.11 | 0.29 | 0.27 |
| Scn2aB10_ | | | | | | | | | | |
| mRnu1b6 | | | | | | | | | | |
| 538_mRn7sk_ | 538 | mRn7sk | Scn2aB10 | hRNU6-1 | 1.18 | 0.94 | 1.24 | 1.12 | 0.16 | 0.24 |
| Scn2aB10_ | | | | | | | | | | |
| hRNU6-1 | | | | | | | | | | |
| 541_mRn7sk_ | 541 | mRn7sk | Scn2aB10 | hRNU12 | 1.17 | 0.94 | 1.25 | 1.12 | 0.16 | 0.24 |
| Scn2aB10_ | | | | | | | | | | |
| hRNU12 | | | | | | | | | | |
| 532_mRn7sk_ | 532 | mRn7sk | Scn2aB10 | hRNU1-2 | 1.24 | 0.98 | 1.18 | 1.13 | 0.14 | 0.2 |
| Scn2aB10_ | | | | | | | | | | |
| hRNU1-2 | | | | | | | | | | |
| 531_mRn7sk_ | 531 | mRn7sk | Scn2aB10 | hRNU1-1 | 1.19 | 1.13 | 1.13 | 1.15 | 0.03 | 0.16 |
| Scn2aB10_ | | | | | | | | | | |
| hRNU1-1 | | | | | | | | | | |
| 553_mRn7sk_ | 553 | mRn7sk | Scn2aB10 | mRn7sk | 0.97 | 1.26 | 1.33 | 1.18 | 0.19 | 0.09 |
| Scn2aB10_ | | | | | | | | | | |
| mRn7sk | | | | | | | | | | |
| 537_mRn7sk_ | 537 | mRn7sk | Scn2aB10 | hRNU5A-1 | 1.15 | 1.09 | 1.38 | 1.21 | 0.15 | 0.07 |
| Scn2aB10_ | | | | | | | | | | |
| hRNU5A-1 | | | | | | | | | | |
| 1A1_001_mu1a1_ | 001 | mu1a1 | Scn2aF1Scr2 | U1 | 1.14 | 1.33 | 1.15 | 1.21 | 0.10 | 0.07 |
| Scn2aF1Scr2_ | | | | | | | | | | |
| U1 | | | | | | | | | | |
| 544_mRn7sk_ | 544 | mRn7sk | Scn2aB10 | mRnu1b1 | 1.18 | 1.09 | 1.36 | 1.21 | 0.14 | 0.06 |
| Scn2aB10_ | | | | | | | | | | |
| mRnu1b1 | | | | | | | | | | |
| 523_mRnu12_ | 523 | mRnu12 | Scn2aB10 | mRnu2-10 | 1.35 | 1.04 | 1.24 | 1.21 | 0.16 | 0.06 |
| Scn2aB10_ | | | | | | | | | | |
| mRnu2-10 | | | | | | | | | | |
| 552_mRn7sk_ | 552 | mRn7sk | Scn2aB10 | mRnu12 | 1.22 | 1.03 | 1.42 | 1.22 | 0.20 | 0.05 |
| Scn2aB10_ | | | | | | | | | | |
| mRnu12 | | | | | | | | | | |
| 543_mRn7sk_ | 543 | mRn7sk | Scn2aB10 | mRnu1a1 | 1.22 | 1.17 | 1.28 | 1.22 | 0.05 | 0.05 |
| Scn2aB10_ | | | | | | | | | | |
| mRnu1a1 | | | | | | | | | | |
| 516_mRnu12_ | 516 | mRnu12 | Scn2aB10 | RNU7-1 | 1.17 | 1.15 | 1.38 | 1.23 | 0.13 | 0.04 |
| Scn2aB10_ | | | | | | | | | | |
| RNU7-1 | | | | | | | | | | |
| 529_mRnu12_ | 529 | mRnu12 | Scn2aB10 | mRnu12 | 1.36 | 1.03 | 1.30 | 1.23 | 0.18 | 0.04 |
| Scn2aB10_ | | | | | | | | | | |
| mRnu12 | | | | | | | | | | |
| 525_mRnu12_ | 525 | mRnu12 | Scn2aB10 | mRnu5g | 1.36 | 1.29 | 1.12 | 1.26 | 0.12 | 0.03 |
| Scn2aB10_ | | | | | | | | | | |
| mRnu5g | | | | | | | | | | |
| 533_mRn7sk_ | 533 | mRn7sk | Scn2aB10 | hRNU1-3 | 1.19 | 1.27 | 1.33 | 1.26 | 0.07 | 0.02 |
| Scn2aB10_ | | | | | | | | | | |
| hRNU1-3 | | | | | | | | | | |
| 540_mRn7sk_ | 540 | mRn7sk | Scn2aB10 | hRNU11 | 1.20 | 1.01 | 1.63 | 1.28 | 0.32 | 0.02 |
| Scn2aB10_ | | | | | | | | | | |
| hRNU11 | | | | | | | | | | |
| 512_mRnu12_ | 512 | mRnu12 | Scn2aB10 | hU3 | 1.31 | 1.16 | 1.47 | 1.32 | 0.15 | 0.008 |
| Scn2aB10_hU3 | | | | | | | | | | |
| 519_mRnu12_ | 519 | mRnu12 | Scn2aB10 | hRN7SK | 1.47 | 1.35 | 1.16 | 1.33 | 0.16 | 0.006 |
| Scn2aB10_ | | | | | | | | | | |
| hRN7SK | | | | | | | | | | |
| 508_mRnu12_ | 508 | mRnu12 | Scn2aB10 | hRNU1-1 | 1.46 | 1.22 | 1.33 | 1.34 | 0.12 | 0.005 |
| Scn2aB10_ | | | | | | | | | | |
| hRNU1-1 | | | | | | | | | | |
| 2C7_154_ | 154 | hRNU5A- | Scn2aB10 | hRNU6-1 | 1.45 | 1.30 | 1.26 | 1.34 | 0.10 | 0.005 |
| hRNU5A- | | 1 | | | | | | | | |
| 1_Scn2aB10_ | | | | | | | | | | |
| hRNU6-1 | | | | | | | | | | |
| 1C5_036_ | 036 | hRNU1-2 | Scn2aB10 | RNU7-1 | 1.36 | 1.30 | 1.40 | 1.35 | 0.05 | 0.003 |
| hRNU1- | | | | | | | | | | |
| 2_Scn2aB10_ | | | | | | | | | | |
| RNU7-1 | | | | | | | | | | |
| 517_mRnu12_ | 517 | mRnu12 | Scn2aB10 | hRNU11 | 1.62 | 1.1. | 1.32 | 1.36 | 0.25 | 0.003 |
| Scn2aB10_ | | | | | | | | | | |
| hRNU11 | | | | | | | | | | |
| 1D7_054_ | 054 | hRNU1-3 | Scn2aB10 | hRNU2-1 | 1.49 | 1.22 | 1.44 | 1.38 | 0.14 | 0.001 |
| hRNU1- | | | | | | | | | | |
| 3_Scn2aB10_ | | | | | | | | | | |
| hRNU2-1 | | | | | | | | | | |
| 513_mRnu12_ | 513 | mRnu12 | Scn2aB10 | hRNU4-1 | 1.34 | 1.26 | 1.56 | 1.39 | 0.16 | 0.001 |
| Scn2aB10_ | | | | | | | | | | |
| hRNU4-1 | | | | | | | | | | |
| 528_mRnu12_ | 528 | mRnu12 | Scn2aB10 | mRnul1 | 1.36 | 1.35 | 1.46 | 1.39 | 0.06 | 0.001 |
| Scn2aB10_ | | | | | | | | | | |
| mRnu11 | | | | | | | | | | |
| 511_mRnu12_ | 511 | mRnu12 | Scn2aB10 | hRNU2-1 | 1.57 | 1.36 | 1.28 | 1.40 | 0.15 | <0.001 |
| Scn2aB10_ | | | | | | | | | | |
| hRNU2-1 | | | | | | | | | | |
| 509_mRnu12_ | 509 | mRnu12 | Scn2aB10 | hRNU1-2 | 1.27 | 1.45 | 1.48 | 1.40 | 0.12 | <0.001 |
| Scn2aB10_ | | | | | | | | | | |
| hRNU1-2 | | | | | | | | | | |
| 510_mRnu12_ | 510 | mRnu12 | Scn2aB10 | hRNU1-3 | 1.47 | 1.40 | 1.41 | 1.43 | 0.04 | <0.001 |
| Scn2aB10_ | | | | | | | | | | |
| hRNU1-3 | | | | | | | | | | |
| 521_mRnu12_ | 521 | mRnu12 | Scn2aB10 | mRnu1b1 | 1.48 | 1.37 | 1.45 | 1.43 | 0.06 | <0.001 |
| Scn2aB10_ | | | | | | | | | | |
| mRnu1b1 | | | | | | | | | | |
| 2B12_195_mu1a1_ | 195 | mu1a1 | Scn2aD12 | U1 | 1.52 | 1.35 | 1.44 | 1.44 | 0.08 | <0.001 |
| Scn2aD12_ | | | | | | | | | | |
| U1 | | | | | | | | | | |
| 518_mRnu12_ | 518 | mRnu12 | Scn2aB10 | hRNU12 | 1.41 | 1.22 | 1.69 | 1.4 | 0.24 | <0.001 |
| Scn2aB10_ | | | | | | | | | | |
| hRNU12 | | | | | | | | | | |
| 506_mRnu11_ | 506 | mRnu11 | Scn2aB10 | mRnu12 | 1.31 | 1.59 | 1.68 | 1.53 | 0.20 | <0.001 |
| Scn2aB10_ | | | | | | | | | | |
| mRnu12 | | | | | | | | | | |
| 514_mRnu12_ | 514 | mRnu12 | Scn2aB10 | hRNU5A-1 | 2.02 | 1.12 | 1.45 | 1.53 | 0.46 | <0.001 |
| Scn2aB10_ | | | | | | | | | | |
| hRNU5A-1 | | | | | | | | | | |
| 527_mRnu12_ | 527 | mRnu12 | Scn2aB10 | mRnu7 | 1.17 | 1.80 | 1.65 | 1.54 | 0.33 | <0.001 |
| Scn2aB10_ | | | | | | | | | | |
| mRnu7 | | | | | | | | | | |
| 2C12_196_ | 196 | mu1a1 | Scn2aB10 | U1 | 1.54 | 1.4 | 1.68 | 1.54 | 0.13 | <0.001 |
| mu1a1_ | | | | | | | | | | |
| Scn2aB10_U1 | | | | | | | | | | |
| 507_mRnu11_ | 507 | mRnu11 | Scn2aB10 | mRn7sk | 1.38 | 1.57 | 1.74 | 1.57 | 0.18 | <0.001 |
| Scn2aB10_ | | | | | | | | | | |
| mRn7sk | | | | | | | | | | |
| 522_mRnu12_ | 522 | mRnu12 | Scn2aB10 | mRnu1b6 | 1.51 | 1.50 | 1.75 | 1.59 | 0.14 | <0.001 |
| Scn2aB10_ | | | | | | | | | | |
| mRnu1b6 | | | | | | | | | | |
| 1B7_052_ | 052 | hRNU1-3 | Scn2aB10 | hRNU1-2 | 1.77 | 1.45 | 1.66 | 1.62 | 0.17 | <0.001 |
| hRNU1- | | | | | | | | | | |
| 3_Scn2aB10_ | | | | | | | | | | |
| hRNU1-2 | | | | | | | | | | |
| 520_mRnu12_ | 520 | mRnu12 | Scn2aB10 | mRnu1a1 | 1.64 | 1.63 | 1.62 | 1.63 | 0.01 | <0.001 |
| Scn2aB10_ | | | | | | | | | | |
| mRnu1a1 | | | | | | | | | | |
| 1B11_084_ | 084 | hRNU2-1 | Scn2aB10 | hRNU12 | 1.89 | 1.42 | 1.75 | 1.69 | 0.24 | <0.001 |
| hRNU2- | | | | | | | | | | |
| 1_Scn2aB10_ | | | | | | | | | | |
| hRNU12 | | | | | | | | | | |
| 2C4_128_ | 128 | hRNU4-1 | Scn2aB10 | hU3 | 1.69 | 1.45 | 2.08 | 1.74 | 0.31 | <0.001 |
| hRNU4- | | | | | | | | | | |
| 1_Scn2aB10_ | | | | | | | | | | |
| hU3 | | | | | | | | | | |
| 505_mRnu11_ | 505 | mRnu11 | Scn2aB10 | mRnu11 | 1.75 | 1.63 | 1.93 | 1.77 | 0.15 | <0.001 |
| Scn2aB10_ | | | | | | | | | | |
| mRnu11 | | | | | | | | | | |
| 2E7 156_ | 156 | hRNU5A- | Scn2aB10 | hRNU11 | 1.97 | 1.60 | 2.00 | 1.86 | 0.22 | <0.001 |
| hRNU5A- | | 1 | | | | | | | | |
| 1_Scn2aB10_ | | | | | | | | | | |
| hRNU11 | | | | | | | | | | |
| 1D1_004_mu1a1_ | 004 | mu1a1 | Scn2aB10 | U1 | 1.99 | 1.73 | 1.86 | 1.86 | 0.13 | <0.001 |
| Scn2aB10_ | | | | | | | | | | |
| U1 | | | | | | | | | | |
| 3B7_253_ | 253 | hRNU12 | Scn2aB10 | hRNU12 | 1.92 | 1.64 | 2.06 | 1.87 | 0.22 | <0.001 |
| hRNU12_ | | | | | | | | | | |
| Scn2aB10hRNU12 | | | | | | | | | | |
| 2A1_100_mu1a1_ | 100 | mu1a1 | Scn2aB10 | U1 | 1.86 | 1.80 | 2.05 | 1.90 | 0.13 | <0.001 |
| Scn2aB10_U1 | | | | | | | | | | |
| 504_mRnu11_ | 504 | mRnu11 | Scn2aB10 | mRnu7 | 1.82 | 2.03 | 1.94 | 1.93 | 0.10 | <0.001 |
| Scn2aB10_ | | | | | | | | | | |
| mRnu7 | | | | | | | | | | |
| 2A7_152_hRN | 152 | hRNU5A- | Scn2aB10 | hRNU4-1 | 2.03 | 1.64 | 2.15 | 1.94 | 0.27 | <0.001 |
| U5A- | | 1 | | | | | | | | |
| 1_Scn2aB10_ | | | | | | | | | | |
| hRNU4-1 | | | | | | | | | | |
| 2B6_144_hRN | 144 | hRNU4-1 | Scn2aB10 | mRnu11 | 2.18 | 1.79 | 1.90 | 1.96 | 0.20 | <0.001 |
| U4- | | | | | | | | | | |
| 1_Scn2aB10_ | | | | | | | | | | |
| mRnu11 | | | | | | | | | | |
| 2F8_166_hRN | 166 | hRNU5A- | Scn2aB10 | mRnu7 | 1.79 | 1.90 | 2.24 | 1.98 | 0.23 | <0.001 |
| U5A- | | 1 | | | | | | | | |
| 1_Scn2aB10_ | | | | | | | | | | |
| mRnu7 | | | | | | | | | | |
| 1E7_055_hRN | 055 | hRNU1-3 | Scn2aB10 | hU3 | 2.01 | 2.10 | 2.05 | 2.06 | 0.04 | <0.001 |
| U1- | | | | | | | | | | |
| 3_Scn2aB10_ | | | | | | | | | | |
| hU3 | | | | | | | | | | |
| 1A12_091_ | 091 | hRNU2-1 | Scn2aB10 | mRnu5g | 2.18 | 1.89 | 2.11 | 2.06 | 0.15 | <0.001 |
| hRNU2- | | | | | | | | | | |
| 1_Scn2aB10_ | | | | | | | | | | |
| mRnu5g | | | | | | | | | | |
| 3B8_262_ | 262 | hRNU12 | Scn2aB10 | mRnu7 | 2.02 | 1.90 | 2.30 | 2.07 | 0.21 | <0.001 |
| hRNU12 | | | | | | | | | | |
| Scn2aB10_mRnu7 | | | | | | | | | | |
| 502_mRnu11_ | 502 | mRnu11 | Scn2aB10 | mRnu5g | 1.86 | 1.92 | 2.50 | 2.09 | 0.36 | <0.001 |
| Scn2aB10_ | | | | | | | | | | |
| mRnu5g | | | | | | | | | | |
| 1E6_047_hRN | 047 | hRNU1-2 | Scn2aB10 | mRnu7 | 2.06 | 1.98 | 2.42 | 2.16 | 0.24 | <0.001 |
| U1- | | | | | | | | | | |
| 2_Scn2aB10_ | | | | | | | | | | |
| mRnu7 | | | | | | | | | | |
| 3A6_244_hRNU12_ | 244 | hRNU12 | Scn2aB10 | hRNU1-2 | 2.69 | 2.47 | 2.35 | 2.50 | 0.17 | <0.001 |
| Scn2aB10_ | | | | | | | | | | |
| hRNU1-2 | | | | | | | | | | |

### Example 10: Example snRNA Sequences and Example Expression Construct Sequences

[0274] Tables 14A-14C include some example snRNA sequences. Some such RNA sequences may be useful in a composition or method herein. A DNA sequence encoding an snRNA sequence of any of Tables 14A-14C may have a similar sequence but have Ts instead of Us. Some such DNA sequences may be useful in a composition or method herein, such as in an expression construct or vector, or in a method of treatment that includes administering a composition comprising the expression construct or vector.

TABLE 14A
DNA Example U7 snRNA sequences targeting SCN1A mRNA-corresponding with
constructs in Table 2A

| Sequence | | SEQ |
|---|---|---|
| Name | snRNA Sequences (5′ to 3′) | ID NO: |
| Scramble-01 | AUGAUAGGGACUUAGGGUGAGCACCCCAUCCCCCACUACAAAUUUUUG | 923 |
| | GAGcaggUUUUcUgacUUcggUcggaaaaccccU | |
| N5-01 | AUGAUAGGGACUUAGGGUGAAACCACCGCUCCACCCCAUCAAUUUUUG | 924 |
| | GAGcaggUUUUcUgacUUcggUcggaaaaccccU | |
| N5-02 | AUGAUAGGGACUUAGGGUGACAAGUUGGAGCAAGAUUAUCAAUUUUUG | 925 |
| | GAGcaggUUUUcUgacUUcggUcggaaaaccccU | |
| N5-03 | AUGAUAGGGACUUAGGGUGACUAUAUAAAAUAGAAAUAUAAAUUUUU | 926 |
| | GGAGcaggUUUUcUgacUUcggUcggaaaaccccU | |
| N5-04 | AUGAUAGGGACUUAGGGUGAUAGUUUAUUAUUAGUUAGAAAAUUUUU | 927 |
| | GGAGcaggUUUUcUgacUUcggUcggaaaaccccU | |
| N5-05 | AUGAUAGGGACUUAGGGUGAGAGGAACCACCGCUCCACCCCAUCAAUU | 928 |
| | UUUGGAGcaggUUUUcUgacUUcggUcggaaaaccccU | |
| N5-06 | AUGAUAGGGACUUAGGGUGACAUCCAAGUUGGAGCAAGAUUAUCAAUU | 929 |
| | UUUGGAGcaggUUUUcUgacUUcggUcggaaaaccccU | |
| N5-07 | AUGAUAGGGACUUAGGGUGAUAUCCUAUAUAAAAUAGAAAUAUAAAU | 930 |
| | UUUUGGAGcaggUUUUcUgacUUcggUcggaaaaccccU | |
| N5-08 | AUGAUAGGGACUUAGGGUGAUAUAUAGUUUAUUAUUAGUUAGAAAAU | 931 |
| | UUUUGGAGcaggUUUUcUgacUUcggUcggaaaaccccU | |
| N5-09 | AUGAUAGGGACUUAGGGUGAGGGAGGAACCACCGCUCCACCCCAUCAA | 932 |
| | UUUUUGGAGcaggUUUUcUgacUUcggUcggaaaaccccU | |
| N5-10 | AUGAUAGGGACUUAGGGUGACCCAUCCAAGUUGGAGCAAGAUUAUCAA | 933 |
| | UUUUUGGAGcaggUUUUcUgacUUcggUcggaaaaccccU | |
| N5-11 | AUGAUAGGGACUUAGGGUGAAUUAUCCUAUAUAAAAUAGAAAUAUAA | 934 |
| | AUUUUUGGAGcaggUUUUcUgacUUcggUcggaaaaccccU | |
| N5-12 | AUGAUAGGGACUUAGGGUGAAAUAUAUAGUUUAUUAUUAGUUAGAAA | 935 |
| | AUUUUUGGAGcaggUUUUcUgacUUcggUcggaaaaccccU | |
| N5-13 | AUGAUAGGGACUUAGGGUGAUGAGGGGAGGAACCACCGCUCCACCCCA | 936 |
| | UCAAUUUUUGGAGcaggUUUUcUgacUUcggUcggaaaaccccU | |
| N5-14 | AUGAUAGGGACUUAGGGUGACCACCCCAUCCAAGUUGGAGCAAGAUUA | 937 |
| | UCAAUUUUUGGAGcaggUUUUcUgacUUcggUcggaaaaccccU | |
| N5-15 | AUGAUAGGGACUUAGGGUGACAAGAUUAUCCUAUAUAAAAUAGAAAUA | 938 |
| | UAAAUUUUUGGAGcaggUUUUcUgacUUcggUcggaaaaccccU | |
| N5-16 | AUGAUAGGGACUUAGGGUGAUAGAAAUAUAUAGUUUAUUAUUAGUUA | 939 |
| | GAAAAUUUUUGGAGcaggUUUUcUgacUUcggUcggaaaaccccU | |
| N3-01 | AUGAUAGGGACUUAGGGUGAAGUGCAAGGAUUAAAGGUAGAAUUUUU | 940 |
| | GGAGcaggUUUUcUgacUUcggUcggaaaaccccU | |
| N3-02 | AUGAUAGGGACUUAGGGUGACAAAAGGGGUAAUACAGUACAAUUUUUG | 941 |
| | GAGcaggUUUUcUgacUUcggUcggaaaaccccU | |
| N3-03 | AUGAUAGGGACUUAGGGUGACCAUAAUAAAGGGCUGAGGGAAUUUUUG | 942 |
| | GAGcaggUUUUcUgacUUcggUcggaaaaccccU | |
| N3-04 | AUGAUAGGGACUUAGGGUGAGAGGAACCACCGCUCCACCCAAUUUUUG | 943 |
| | GAGcaggUUUUcUgacUUcggUcggaaaaccccU | |
| N3-05 | AUGAUAGGGACUUAGGGUGAUCACAGUGCAAGGAUUAAAGGUAGAAUU | 944 |
| | UUUGGAGcaggUUUUcUgacUUcggUcggaaaaccccU | |
| N3-06 | AUGAUAGGGACUUAGGGUGAGUAGCAAAAGGGGUAAUACAGUACAAUU | 945 |
| | UUUGGAGcaggUUUUcUgacUUcggUcggaaaaccccU | |
| N3-07 | AUGAUAGGGACUUAGGGUGAGUACCCAUAAUAAAGGGCUGAGGGAAUU | 946 |
| | UUUGGAGcaggUUUUcUgacUUcggUcggaaaaccccU | |
| N3-08 | AUGAUAGGGACUUAGGGUGAAGGGGAGGAACCACCGCUCCACCCAAUU | 947 |
| | UUUGGAGcaggUUUUcUgacUUcggUcggaaaaccccU | |
| N3-09 | AUGAUAGGGACUUAGGGUGAAGUCACAGUGCAAGGAUUAAAGGUAGAA | 948 |
| | UUUUUGGAGcaggUUUUcUgacUUcggUcggaaaaccccU | |
| N3-10 | AUGAUAGGGACUUAGGGUGAAGGUAGCAAAAGGGGUAAUACAGUACAA | 949 |
| | UUUUUGGAGcaggUUUUcUgacUUcggUcggaaaaccccU | |
| N3-11 | AUGAUAGGGACUUAGGGUGACAGUACCCAUAAUAAAGGGCUGAGGGAA | 950 |
| | UUUUUGGAGcaggUUUUcUgacUUcggUcggaaaaccccU | |
| N3-12 | AUGAUAGGGACUUAGGGUGAUGAGGGGAGGAACCACCGCUCCACCCAA | 951 |
| | UUUUUGGAGcaggUUUUcUgacUUcggUcggaaaaccccU | |
| N3-13 | AUGAUAGGGACUUAGGGUGACAUAAGUCACAGUGCAAGGAUUAAAGGU | 952 |
| | AGAAUUUUUGGAGcaggUUUUcUgacUUcggUcggaaaaccccU | |
| N3-14 | AUGAUAGGGACUUAGGGUGAUUAAAGGUAGCAAAAGGGGUAAUACAG | 953 |
| | UACAAUUUUUGGAGcaggUUUUcUgacUUcggUcggaaaaccccU | |
| N3-15 | AUGAUAGGGACUUAGGGUGAAAUACAGUACCCAUAAUAAAGGGCUGAG | 954 |
| | GGAAUUUUUGGAGcaggUUUUcUgacUUcggUcggaaaaccccU | |
| N3-16 | AUGAUAGGGACUUAGGGUGAGGGCUGAGGGGAGGAACCACCGCUCCAC | 955 |
| | CCAAUUUUUGGAGcaggUUUUcUgacUUcggUcggaaaaccccU | |
| N5-ESSalt1- | UUUGUUCCGUGGGUGGUUUAAACCACCGCUCCACCCCAUCAAUUUUUG | 956 |
| 01 | GAGcaggUUUUcUgacUUcggUcggaaaaccccU | |
| N5-ESSalt1- | UUUGUUCCGUGGGUGGUUUACAAGUUGGAGCAAGAUUAUCAAUUUUUG | 957 |
| 02 | GAGcaggUUUUcUgacUUcggUcggaaaaccccU | |
| N5-ESSalt1- | UUUGUUCCGUGGGUGGUUUACUAUAUAAAAUAGAAAUAUAAAUUUUU | 958 |
| 03 | GGAGcaggUUUUcUgacUUcggUcggaaaaccccU | |
| N5-ESSalt1- | UUUGUUCCGUGGGUGGUUUAUAGUUUAUUAUUAGUUAGAAAAUUUUU | 959 |
| 04 | GGAGcaggUUUUcUgacUUcggUcggaaaaccccU | |
| N5-ESSalt1- | UUUGUUCCGUGGGUGGUUUAGAGGAACCACCGCUCCACCCCAUCAAUU | 960 |
| 05 | UUUGGAGcaggUUUUcUgacUUcggUcggaaaaccccU | |
| N5-ESSalt1- | UUUGUUCCGUGGGUGGUUUACAUCCAAGUUGGAGCAAGAUUAUCAAUU | 961 |
| 06 | UUUGGAGcaggUUUUcUgacUUcggUcggaaaaccccU | |
| N5-ESSalt1- | UUUGUUCCGUGGGUGGUUUAUAUCCUAUAUAAAAUAGAAAUAUAAAUU | 962 |
| 07 | UUUGGAGcaggUUUUcUgacUUcggUcggaaaaccccU | |
| N5-ESSalt1- | UUUGUUCCGUGGGUGGUUUAUAUAUAGUUUAUUAUUAGUUAGAAAAU | 963 |
| 08 | UUUUGGAGcaggUUUUcUgacUUcggUcggaaaaccccU | |
| N5-ESSalt1- | UUUGUUCCGUGGGUGGUUUAGGGAGGAACCACCGCUCCACCCCAUCAA | 964 |
| 09 | UUUUUGGAGcaggUUUUcUgacUUcggUcggaaaaccccU | |
| Scramble-02 | UUUGUUCCGUGGGUGGUUUAGGAGAAUCACCUUAUAGGAUAAUUUUUG | 965 |
| | GAGcaggUUUUcUgacUUcggUcggaaaaccccU | |
| N5-ESSalt1- | UUUGUUCCGUGGGUGGUUUACCCAUCCAAGUUGGAGCAAGAUUAUCAA | 966 |
| 10 | UUUUUGGAGcaggUUUUcUgacUUcggUcggaaaaccccU | |
| N5-ESSalt1- | UUUGUUCCGUGGGUGGUUUAAUUAUCCUAUAUAAAAUAGAAAUAUAAA | 967 |
| 11 | UUUUUGGAGcaggUUUUcUgacUUcggUcggaaaaccccU | |
| N5-ESSalt1- | UUUGUUCCGUGGGUGGUUUAAAUAUAUAGUUUAUUAUUAGUUAGAAA | 968 |
| 12 | AUUUUUGGAGcaggUUUUcUgacUUcggUcggaaaaccccU | |
| N5-ESSalt1- | UUUGUUCCGUGGGUGGUUUAUGAGGGGAGGAACCACCGCUCCACCCCA | 969 |
| 13 | UCAAUUUUUGGAGcaggUUUUcUgacUUcggUcggaaaaccccU | |
| N5-ESSalt1- | UUUGUUCCGUGGGUGGUUUACCACCCCAUCCAAGUUGGAGCAAGAUUA | 970 |
| 14 | UCAAUUUUUGGAGcaggUUUUcUgacUUcggUcggaaaaccccU | |
| N5-ESSalt1- | UUUGUUCCGUGGGUGGUUUACAAGAUUAUCCUAUAUAAAAUAGAAAUA | 971 |
| 15 | UAAAUUUUUGGAGcaggUUUUcUgacUUcggUcggaaaaccccU | |
| N5-ESSalt1- | UUUGUUCCGUGGGUGGUUUAUAGAAAUAUAUAGUUUAUUAUUAGUUA | 972 |
| 16 | GAAAAUUUUUGGAGcaggUUUUcUgacUUcggUcggaaaaccccU | |
| N3-ESSalt1- | UUUGUUCCGUGGGUGGUUUAAGUGCAAGGAUUAAAGGUAGAAUUUUU | 973 |
| 01 | GGAGcaggUUUUcUgacUUcggUcggaaaaccccU | |
| N3-ESSalt1- | UUUGUUCCGUGGGUGGUUUACAAAAGGGGUAAUACAGUACAAUUUUUG | 974 |
| 02 | GAGcaggUUUUcUgacUUcggUcggaaaaccccU | |
| N3-ESSalt1- | UUUGUUCCGUGGGUGGUUUACCAUAAUAAAGGGCUGAGGGAAUUUUUG | 975 |
| 03 | GAGcaggUUUUcUgacUUcggUcggaaaaccccU | |
| N3-ESSalt1- | UUUGUUCCGUGGGUGGUUUAGAGGAACCACCGCUCCACCCAAUUUUUG | 976 |
| 04 | GAGcaggUUUUcUgacUUcggUcggaaaaccccU | |
| Scramble-03 | UUUGUUCCGUGGGUGGUUUAGAAUAAUAACAUAAUAAUAUAAUUUUU | 977 |
| | GGAGcaggUUUUcUgacUUcggUcggaaaaccccU | |
| N3-ESSalt1- | UUUGUUCCGUGGGUGGUUUAUCACAGUGCAAGGAUUAAAGGUAGAAUU | 978 |
| 05 | UUUGGAGcaggUUUUcUgacUUcggUcggaaaaccccU | |
| N3-ESSalt1- | UUUGUUCCGUGGGUGGUUUAGUAGCAAAAGGGGUAAUACAGUACAAUU | 979 |
| 06 | UUUGGAGcaggUUUUcUgacUUcggUcggaaaaccccU | |
| N3-ESSalt1- | UUUGUUCCGUGGGUGGUUUAGUACCCAUAAUAAAGGGCUGAGGGAAUU | 980 |
| 07 | UUUGGAGcaggUUUUcUgacUUcggUcggaaaaccccU | |
| N3-ESSalt1- | UUUGUUCCGUGGGUGGUUUAAGGGGAGGAACCACCGCUCCACCCAAUU | 981 |
| 08 | UUUGGAGcaggUUUUcUgacUUcggUcggaaaaccccU | |
| N3-ESSalt1- | UUUGUUCCGUGGGUGGUUUAAGUCACAGUGCAAGGAUUAAAGGUAGAA | 982 |
| 09 | UUUUUGGAGcaggUUUUcUgacUUcggUcggaaaaccccU | |
| N3-ESSalt1- | UUUGUUCCGUGGGUGGUUUAAGGUAGCAAAAGGGGUAAUACAGUACAA | 983 |
| 10 | UUUUUGGAGcaggUUUUcUgacUUcggUcggaaaaccccU | |
| N3-ESSalt1- | UUUGUUCCGUGGGUGGUUUACAGUACCCAUAAUAAAGGGCUGAGGGAA | 984 |
| 11 | UUUUUGGAGcaggUUUUcUgacUUcggUcggaaaaccccU | |
| N3-ESSalt1- | UUUGUUCCGUGGGUGGUUUAUGAGGGGAGGAACCACCGCUCCACCCAA | 985 |
| 12 | UUUUUGGAGcaggUUUUcUgacUUcggUcggaaaaccccU | |
| N3-ESSalt1- | UUUGUUCCGUGGGUGGUUUACAUAAGUCACAGUGCAAGGAUUAAAGGU | 986 |
| 13 | AGAAUUUUUGGAGcaggUUUUcUgacUUcggUcggaaaaccccU | |
| N3-ESSalt1- | UUUGUUCCGUGGGUGGUUUAUUAAAGGUAGCAAAAGGGGUAAUACAGU | 987 |
| 14 | ACAAUUUUUGGAGcaggUUUUcUgacUUcggUcggaaaaccccU | |
| N3-ESSalt1- | UUUGUUCCGUGGGUGGUUUAAAUACAGUACCCAUAAUAAAGGGCUGAG | 988 |
| 15 | GGAAUUUUUGGAGcaggUUUUcUgacUUcggUcggaaaaccccU | |
| N3-ESSalt1- | UUUGUUCCGUGGGUGGUUUAGGGCUGAGGGGAGGAACCACCGCUCCAC | 989 |
| 16 | CCAAUUUUUGGAGcaggUUUUcUgacUUcggUcggaaaaccccU | |
| N5-ESSalt2- | UGGGGGGAGGUAGGUAGGUAAACCACCGCUCCACCCCAUCAAUUUUUG | 990 |
| 01 | GAGcaggUUUUcUgacUUcggUcggaaaaccccU | |
| N5-ESSalt2- | UGGGGGGAGGUAGGUAGGUACAAGUUGGAGCAAGAUUAUCAAUUUUU | 991 |
| 02 | GGAGcaggUUUUcUgacUUcggUcggaaaaccccU | |
| N5-ESSalt2- | UGGGGGGAGGUAGGUAGGUACUAUAUAAAAUAGAAAUAUAAAUUUUU | 992 |
| 03 | GGAGcaggUUUUcUgacUUcggUcggaaaaccccU | |
| N5-ESSalt2- | UGGGGGGAGGUAGGUAGGUAUAGUUUAUUAUUAGUUAGAAAAUUUUU | 993 |
| 04 | GGAGcaggUUUUcUgacUUcggUcggaaaaccccU | |
| N5-ESSalt2- | UGGGGGGAGGUAGGUAGGUAGAGGAACCACCGCUCCACCCCAUCAAUU | 994 |
| 05 | UUUGGAGcaggUUUUcUgacUUcggUcggaaaaccccU | |
| N5-ESSalt2- | UGGGGGGAGGUAGGUAGGUACAUCCAAGUUGGAGCAAGAUUAUCAAUU | 995 |
| 06 | UUUGGAGcaggUUUUcUgacUUcggUcggaaaaccccU | |
| N5-ESSalt2- | UGGGGGGAGGUAGGUAGGUAUAUCCUAUAUAAAAUAGAAAUAUAAAU | 996 |
| 07 | UUUUGGAGcaggUUUUcUgacUUcggUcggaaaaccccU | |
| N5-ESSalt2- | UGGGGGGAGGUAGGUAGGUAUAUAUAGUUUAUUAUUAGUUAGAAAAU | 997 |
| 08 | UUUUGGAGcaggUUUUcUgacUUcggUcggaaaaccccU | |
| N5-ESSalt2- | UGGGGGGAGGUAGGUAGGUAGGGAGGAACCACCGCUCCACCCCAUCAA | 998 |
| 09 | UUUUUGGAGcaggUUUUcUgacUUcggUcggaaaaccccU | |
| N5-ESSalt2- | UGGGGGGAGGUAGGUAGGUACCCAUCCAAGUUGGAGCAAGAUUAUCAA | 999 |
| 10 | UUUUUGGAGcaggUUUUcUgacUUcggUcggaaaaccccU | |
| N5-ESSalt2- | UGGGGGGAGGUAGGUAGGUAAUUAUCCUAUAUAAAAUAGAAAUAUAA | 1000 |
| 11 | AUUUUUGGAGcaggUUUUcUgacUUcggUcggaaaaccccU | |
| N5-ESSalt2- | UGGGGGGAGGUAGGUAGGUAUGAGGGGAGGAACCACCGCUCCACCCCA | 1001 |
| 13 | UCAAUUUUUGGAGcaggUUUUcUgacUUcggUcggaaaaccccU | |
| N5-ESSalt2- | UGGGGGGAGGUAGGUAGGUACCACCCCAUCCAAGUUGGAGCAAGAUUA | 1002 |
| 14 | UCAAUUUUUGGAGcaggUUUUcUgacUUcggUcggaaaaccccU | |
| N5-ESSalt2- | UGGGGGGAGGUAGGUAGGUACAAGAUUAUCCUAUAUAAAAUAGAAAU | 1003 |
| 15 | AUAAAUUUUUGGAGcaggUUUUcUgacUUcggUcggaaaaccccU | |
| N3-ESSalt2- | UGGGGGGAGGUAGGUAGGUAAGUGCAAGGAUUAAAGGUAGAAUUUUU | 1004 |
| 01 | GGAGcaggUUUUcUgacUUcggUcggaaaaccccU | |
| N3-ESSalt2- | UGGGGGGAGGUAGGUAGGUACAAAAGGGGUAAUACAGUACAAUUUUU | 1005 |
| 02 | GGAGcaggUUUUcUgacUUcggUcggaaaaccccU | |
| N3-ESSalt2- | UGGGGGGAGGUAGGUAGGUACCAUAAUAAAGGGCUGAGGGAAUUUUU | 1006 |
| 03 | GGAGcaggUUUUcUgacUUcggUcggaaaaccccU | |
| N3-ESSalt2- | UGGGGGGAGGUAGGUAGGUAGAGGAACCACCGCUCCACCCAAUUUUUG | 1007 |
| 04 | GAGcaggUUUUcUgacUUcggUcggaaaaccccU | |
| N3-ESSalt2- | UGGGGGGAGGUAGGUAGGUAUCACAGUGCAAGGAUUAAAGGUAGAAU | 1008 |
| 05 | UUUUGGAGcaggUUUUcUgacUUcggUcggaaaaccccU | |
| N3-ESSalt2- | UGGGGGGAGGUAGGUAGGUAGUAGCAAAAGGGGUAAUACAGUACAAU | 1009 |
| 06 | UUUUGGAGcaggUUUUcUgacUUcggUcggaaaaccccU | |
| N3-ESSalt2- | UGGGGGGAGGUAGGUAGGUAGUACCCAUAAUAAAGGGCUGAGGGAAUU | 1010 |
| 07 | UUUGGAGcaggUUUUcUgacUUcggUcggaaaaccccU | |
| N3-ESSalt2- | UGGGGGGAGGUAGGUAGGUAAGGGGAGGAACCACCGCUCCACCCAAUU | 1011 |
| 08 | UUUGGAGcaggUUUUcUgacUUcggUcggaaaaccccU | |
| N3-ESSalt2- | UGGGGGGAGGUAGGUAGGUAAGUCACAGUGCAAGGAUUAAAGGUAGA | 1012 |
| 09 | AUUUUUGGAGcaggUUUUcUgacUUcggUcggaaaaccccU | |
| N3-ESSalt2- | UGGGGGGAGGUAGGUAGGUAAGGUAGCAAAAGGGGUAAUACAGUACA | 1013 |
| 10 | AUUUUUGGAGcaggUUUUcUgacUUcggUcggaaaaccccU | |
| N3-ESSalt2- | UGGGGGGAGGUAGGUAGGUACAGUACCCAUAAUAAAGGGCUGAGGGAA | 1014 |
| 11 | UUUUUGGAGcaggUUUUcUgacUUcggUcggaaaaccccU | |
| N3-ESSalt2- | UGGGGGGAGGUAGGUAGGUACAUAAGUCACAGUGCAAGGAUUAAAGGU | 1015 |
| 13 | AGAAUUUUUGGAGcaggUUUUcUgacUUcggUcggaaaaccccU | |
| N3-ESSalt2- | UGGGGGGAGGUAGGUAGGUAUUAAAGGUAGCAAAAGGGGUAAUACAG | 1016 |
| 14 | UACAAUUUUUGGAGcaggUUUUcUgacUUcggUcggaaaaccccU | |
| N3-ESSalt2- | UGGGGGGAGGUAGGUAGGUAAAUACAGUACCCAUAAUAAAGGGCUGAG | 1017 |
| 15 | GGAAUUUUUGGAGcaggUUUUcUgacUUcggUcggaaaaccccU | |
| Scramble-04 | UGGGGGGAGGUAGGUAGGUAGAAAUUUAUGUAUUGAUUAUAAUUUUU | 1018 |
| | GGAGcaggUUUUcUgacUUcggUcggaaaaccccU | |

TABLE 14B
DNA Example U7 snRNA sequences targeting SCN1A mRNA-corresponding with
constructs in Table 2B

| Sequence | | SEQ |
|---|---|---|
| Name | snRNA Sequences (5′ to 3′) | ID NO: |
| N5-01 | AUGAUAGGGACUUAGGGUGAAACCAGCGCUCCACCCCAUCAAUUUUUG | 1019 |
| | GAGcaggUUUUcUgacUUcggUcggaaaaccccU | |
| N5-02 | AUGAUAGGGACUUAGGGUGACAAGUUGGAGCAAGAUUAUCAAUUUUUG | 1020 |
| | GAGcaggUUUUcUgacUUcggUcggaaaaccccU | |
| N5-03 | AUGAUAGGGACUUAGGGUGACUAUACAAAAUAGAAAUAUAAAUUUUU | 1021 |
| | GGAGcaggUUUUcUgacUUcggUcggaaaaccccU | |
| N5-04 | AUGAUAGGGACUUAGGGUGAUAGUUUGUUAUUAGUUAGAAAAUUUUU | 1022 |
| | GGAGcaggUUUUcUgacUUcggUcggaaaaccccU | |
| N5-05 | AUGAUAGGGACUUAGGGUGAGAGGAACCAGCGCUCCACCCCAUCAAUU | 1023 |
| | UUUGGAGcaggUUUUcUgacUUcggUcggaaaaccccU | |
| N5-06 | AUGAUAGGGACUUAGGGUGACAUCCAAGUUGGAGCAAGAUUAUCAAUU | 1024 |
| | UUUGGAGcaggUUUUcUgacUUcggUcggaaaaccccU | |
| N5-07 | AUGAUAGGGACUUAGGGUGAUAUCCUAUACAAAAUAGAAAUAUAAAUU | 1025 |
| | UUUGGAGcaggUUUUcUgacUUcggUcggaaaaccccU | |
| N5-08 | AUGAUAGGGACUUAGGGUGAUAUAUAGUUUGUUAUUAGUUAGAAAAU | 1026 |
| | UUUUGGAGcaggUUUUcUgacUUcggUcggaaaaccccU | |
| N5-09 | AUGAUAGGGACUUAGGGUGAGGGAGGAACCAGCGCUCCACCCCAUCAA | 1027 |
| | UUUUUGGAGcaggUUUUcUgacUUcggUcggaaaaccccU | |
| N5-10 | AUGAUAGGGACUUAGGGUGACCCAUCCAAGUUGGAGCAAGAUUAUCAA | 1028 |
| | UUUUUGGAGcaggUUUUcUgacUUcggUcggaaaaccccU | |
| N5-11 | AUGAUAGGGACUUAGGGUGAAUUAUCCUAUACAAAAUAGAAAUAUAAA | 1029 |
| | UUUUUGGAGcaggUUUUcUgacUUcggUcggaaaaccccU | |
| N5-12 | AUGAUAGGGACUUAGGGUGAAAUAUAUAGUUUGUUAUUAGUUAGAAA | 1030 |
| | AUUUUUGGAGcaggUUUUcUgacUUcggUcggaaaaccccU | |
| N5-13 | AUGAUAGGGACUUAGGGUGAUCAGGGGAGGAACCAGCGCUCCACCCCA | 1031 |
| | UCAAUUUUUGGAGcaggUUUUcUgacUUcggUcggaaaaccccU | |
| N5-14 | AUGAUAGGGACUUAGGGUGACCACCCCAUCCAAGUUGGAGCAAGAUUA | 1032 |
| | UCAAUUUUUGGAGcaggUUUUcUgacUUcggUcggaaaaccccU | |
| N5-15 | AUGAUAGGGACUUAGGGUGACAAGAUUAUCCUAUACAAAAUAGAAAUA | 1033 |
| | UAAAUUUUUGGAGcaggUUUUcUgacUUcggUcggaaaaccccU | |
| N5-16 | AUGAUAGGGACUUAGGGUGAUAGAAAUAUAUAGUUUGUUAUUAGUUA | 1034 |
| | GAAAAUUUUUGGAGcaggUUUUcUgacUUcggUcggaaaaccccU | |
| N3-01 | AUGAUAGGGACUUAGGGUGAAGUGCAAGGAUUAAAGGUAGAAUUUUU | 1035 |
| | GGAGcaggUUUUcUgacUUcggUcggaaaaccccU | |
| N3-02 | AUGAUAGGGACUUAGGGUGACAAAAGGGGUAAUACAGUACAAUUUUUG | 1036 |
| | GAGcaggUUUUcUgacUUcggUcggaaaaccccU | |
| N3-03 | AUGAUAGGGACUUAGGGUGACCAUAAUAAAGGGCUCAGGGAAUUUUUG | 1037 |
| | GAGcaggUUUUcUgacUUcggUcggaaaaccccU | |
| N3-04 | AUGAUAGGGACUUAGGGUGAGAGGAACCAGCGCUCCACCCAAUUUUUG | 1038 |
| | GAGcaggUUUUcUgacUUcggUcggaaaaccccU | |
| N3-05 | AUGAUAGGGACUUAGGGUGAUCACAGUGCAAGGAUUAAAGGUAGAAUU | 1039 |
| | UUUGGAGcaggUUUUcUgacUUcggUcggaaaaccccU | |
| N3-06 | AUGAUAGGGACUUAGGGUGAGUAGCAAAAGGGGUAAUACAGUACAAUU | 1040 |
| | UUUGGAGcaggUUUUcUgacUUcggUcggaaaaccccU | |
| N3-07 | AUGAUAGGGACUUAGGGUGAGUACCCAUAAUAAAGGGCUCAGGGAAUU | 1041 |
| | UUUGGAGcaggUUUUcUgacUUcggUcggaaaaccccU | |
| N3-08 | AUGAUAGGGACUUAGGGUGAAGGGGAGGAACCAGCGCUCCACCCAAUU | 1042 |
| | UUUGGAGcaggUUUUcUgacUUcggUcggaaaaccccU | |
| N3-09 | AUGAUAGGGACUUAGGGUGAAGUCACAGUGCAAGGAUUAAAGGUAGAA | 1043 |
| | UUUUUGGAGcaggUUUUcUgacUUcggUcggaaaaccccU | |
| N3-10 | AUGAUAGGGACUUAGGGUGAAGGUAGCAAAAGGGGUAAUACAGUACAA | 1044 |
| | UUUUUGGAGcaggUUUUcUgacUUcggUcggaaaaccccU | |
| N3-11 | AUGAUAGGGACUUAGGGUGACAGUACCCAUAAUAAAGGGCUCAGGGAA | 1045 |
| | UUUUUGGAGcaggUUUUcUgacUUcggUcggaaaaccccU | |
| N3-12 | AUGAUAGGGACUUAGGGUGAUCAGGGGAGGAACCAGCGCUCCACCCAA | 1046 |
| | UUUUUGGAGcaggUUUUcUgacUUcggUcggaaaaccccU | |
| N3-13 | AUGAUAGGGACUUAGGGUGACAUAAGUCACAGUGCAAGGAUUAAAGGU | 1047 |
| | AGAAUUUUUGGAGcaggUUUUcUgacUUcggUcggaaaaccccU | |
| N3-14 | AUGAUAGGGACUUAGGGUGAUUAAAGGUAGCAAAAGGGGUAAUACAG | 1048 |
| | UACAAUUUUUGGAGcaggUUUUcUgacUUcggUcggaaaaccccU | |
| N3-15 | AUGAUAGGGACUUAGGGUGAAAUACAGUACCCAUAAUAAAGGGCUCAG | 1049 |
| | GGAAUUUUUGGAGcaggUUUUcUgacUUcggUcggaaaaccccU | |
| N3-16 | AUGAUAGGGACUUAGGGUGAGGGCUCAGGGGAGGAACCAGCGCUCCAC | 1050 |
| | CCAAUUUUUGGAGcaggUUUUcUgacUUcggUcggaaaaccccU | |
| N5-ESSalt1- | AUGAUAGGGACUUAGGGUGAAACCAGCGCUCCACCCCAUCAAUUUUUG | 1051 |
| 01 | GAGcaggUUUUcUgacUUcggUcggaaaaccccU | |
| N5-ESSalt1- | UUUGUUCCGUGGGUGGUUUACAAGUUGGAGCAAGAUUAUCAAUUUUUG | 1052 |
| 02 | GAGcaggUUUUcUgacUUcggUcggaaaaccccU | |
| N5-ESSalt1- | UUUGUUCCGUGGGUGGUUUACUAUACAAAAUAGAAAUAUAAAUUUUUG | 1053 |
| 03 | GAGcaggUUUUcUgacUUcggUcggaaaaccccU | |
| N5-ESSalt1- | UUUGUUCCGUGGGUGGUUUAUAGUUUGUUAUUAGUUAGAAAAUUUUU | 1054 |
| 04 | GGAGcaggUUUUcUgacUUcggUcggaaaaccccU | |
| N5-ESSalt1- | UUUGUUCCGUGGGUGGUUUAGAGGAACCAGCGCUCCACCCCAUCAAUU | 1055 |
| 05 | UUUGGAGcaggUUUUcUgacUUcggUcggaaaaccccU | |
| N5-ESSalt1- | UUUGUUCCGUGGGUGGUUUACAUCCAAGUUGGAGCAAGAUUAUCAAUU | 1056 |
| 06 | UUUGGAGcaggUUUUcUgacUUcggUcggaaaaccccU | |
| N5-ESSalt1- | UUUGUUCCGUGGGUGGUUUAUAUCCUAUACAAAAUAGAAAUAUAAAUU | 1057 |
| 07 | UUUGGAGcaggUUUUcUgacUUcggUcggaaaaccccU | |
| N5-ESSalt1- | UUUGUUCCGUGGGUGGUUUAUAUAUAGUUUGUUAUUAGUUAGAAAAU | 1058 |
| 08 | UUUUGGAGcaggUUUUcUgacUUcggUcggaaaaccccU | |
| N5-ESSalt1- | UUUGUUCCGUGGGUGGUUUAGGGAGGAACCAGCGCUCCACCCCAUCAA | 1059 |
| 09 | UUUUUGGAGcaggUUUUcUgacUUcggUcggaaaaccccU | |
| N5-ESSalt1- | UUUGUUCCGUGGGUGGUUUACCCAUCCAAGUUGGAGCAAGAUUAUCAA | 1060 |
| 10 | UUUUUGGAGcaggUUUUcUgacUUcggUcggaaaaccccU | |
| N5-ESSalt1- | UUUGUUCCGUGGGUGGUUUAAUUAUCCUAUACAAAAUAGAAAUAUAAA | 1061 |
| 11 | UUUUUGGAGcaggUUUUcUgacUUcggUcggaaaaccccU | |
| N5-ESSalt1- | UUUGUUCCGUGGGUGGUUUAAAUAUAUAGUUUGUUAUUAGUUAGAAA | 1062 |
| 12 | AUUUUUGGAGcaggUUUUcUgacUUcggUcggaaaaccccU | |
| N5-ESSalt1- | UUUGUUCCGUGGGUGGUUUAUCAGGGGAGGAACCAGCGCUCCACCCCA | 1063 |
| 13 | UCAAUUUUUGGAGcaggUUUUcUgacUUcggUcggaaaaccccU | |
| N5-ESSalt1- | UUUGUUCCGUGGGUGGUUUACCACCCCAUCCAAGUUGGAGCAAGAUUA | 1064 |
| 14 | UCAAUUUUUGGAGcaggUUUUcUgacUUcggUcggaaaaccccU | |
| N5-ESSalt1- | UUUGUUCCGUGGGUGGUUUACAAGAUUAUCCUAUACAAAAUAGAAAUA | 1065 |
| 15 | UAAAUUUUUGGAGcaggUUUUcUgacUUcggUcggaaaaccccU | |
| N5-ESSalt1- | UUUGUUCCGUGGGUGGUUUAUAGAAAUAUAUAGUUUGUUAUUAGUUA | 1066 |
| 16 | GAAAAUUUUUGGAGcaggUUUUcUgacUUcggUcggaaaaccccU | |
| N3-ESSalt1- | UUUGUUCCGUGGGUGGUUUAAGUGCAAGGAUUAAAGGUAGAAUUUUU | 1067 |
| 01 | GGAGcaggUUUUcUgacUUcggUcggaaaaccccU | |
| N3-ESSalt1- | UUUGUUCCGUGGGUGGUUUACAAAAGGGGUAAUACAGUACAAUUUUUG | 1068 |
| 02 | GAGcaggUUUUcUgacUUcggUcggaaaaccccU | |
| N3-ESSalt1- | UUUGUUCCGUGGGUGGUUUACCAUAAUAAAGGGCUCAGGGAAUUUUUG | 1069 |
| 03 | GAGcaggUUUUcUgacUUcggUcggaaaaccccU | |
| N3-ESSalt1- | UUUGUUCCGUGGGUGGUUUAGAGGAACCAGCGCUCCACCCAAUUUUUG | 1070 |
| 04 | GAGcaggUUUUcUgacUUcggUcggaaaaccccU | |
| N3-ESSalt1- | UUUGUUCCGUGGGUGGUUUAUCACAGUGCAAGGAUUAAAGGUAGAAUU | 1071 |
| 05 | UUUGGAGcaggUUUUcUgacUUcggUcggaaaaccccU | |
| N3-ESSalt1- | UUUGUUCCGUGGGUGGUUUAGUAGCAAAAGGGGUAAUACAGUACAAUU | 1072 |
| 06 | UUUGGAGcaggUUUUcUgacUUcggUcggaaaaccccU | |
| N3-ESSalt1- | UUUGUUCCGUGGGUGGUUUAGUACCCAUAAUAAAGGGCUCAGGGAAUU | 1073 |
| 07 | UUUGGAGcaggUUUUcUgacUUcggUcggaaaaccccU | |
| N3-ESSalt1- | UUUGUUCCGUGGGUGGUUUAAGGGGAGGAACCAGCGCUCCACCCAAUU | 1074 |
| 08 | UUUGGAGcaggUUUUcUgacUUcggUcggaaaaccccU | |
| N3-ESSalt1- | UUUGUUCCGUGGGUGGUUUAAGUCACAGUGCAAGGAUUAAAGGUAGAA | 1075 |
| 09 | UUUUUGGAGcaggUUUUcUgacUUcggUcggaaaaccccU | |
| N3-ESSalt1- | UUUGUUCCGUGGGUGGUUUAAGGUAGCAAAAGGGGUAAUACAGUACAA | 1076 |
| 10 | UUUUUGGAGcaggUUUUcUgacUUcggUcggaaaaccccU | |
| N3-ESSalt1- | UUUGUUCCGUGGGUGGUUUACAGUACCCAUAAUAAAGGGCUCAGGGAA | 1077 |
| 11 | UUUUUGGAGcaggUUUUcUgacUUcggUcggaaaaccccU | |
| N3-ESSalt1- | UUUGUUCCGUGGGUGGUUUAUCAGGGGAGGAACCAGCGCUCCACCCAA | 1078 |
| 12 | UUUUUGGAGcaggUUUUcUgacUUcggUcggaaaaccccU | |
| N3-ESSalt1- | UUUGUUCCGUGGGUGGUUUACAUAAGUCACAGUGCAAGGAUUAAAGGU | 1079 |
| 13 | AGAAUUUUUGGAGcaggUUUUcUgacUUcggUcggaaaaccccU | |
| N3-ESSalt1- | UUUGUUCCGUGGGUGGUUUAUUAAAGGUAGCAAAAGGGGUAAUACAGU | 1080 |
| 14 | ACAAUUUUUGGAGcaggUUUUcUgacUUcggUcggaaaaccccU | |
| N3-ESSalt1- | UUUGUUCCGUGGGUGGUUUAAAUACAGUACCCAUAAUAAAGGGCUCAG | 1081 |
| 15 | GGAAUUUUUGGAGcaggUUUUcUgacUUcggUcggaaaaccccU | |
| N3-ESSalt1- | UUUGUUCCGUGGGUGGUUUAGGGCUCAGGGGAGGAACCAGCGCUCCAC | 1082 |
| 16 | CCAAUUUUUGGAGcaggUUUUcUgacUUcggUcggaaaaccccU | |
| N5-ESSalt2- | UUUGUUCCGUGGGUGGUUUAAACCAGCGCUCCACCCCAUCAAUUUUUG | 1083 |
| 01 | GAGcaggUUUUcUgacUUcggUcggaaaaccccU | |
| N5-ESSalt2- | UUUGUUCCGUGGGUGGUUUACAAGUUGGAGCAAGAUUAUCAAUUUUUG | 1084 |
| 02 | GAGcaggUUUUcUgacUUcggUcggaaaaccccU | |
| N5-ESSalt2- | UUUGUUCCGUGGGUGGUUUACUAUACAAAAUAGAAAUAUAAAUUUUUG | 1085 |
| 03 | GAGcaggUUUUcUgacUUcggUcggaaaaccccU | |
| N5-ESSalt2- | UGGGGGGAGGUAGGUAGGUAUAGUUUGUUAUUAGUUAGAAAAUUUUU | 1086 |
| 04 | GGAGcaggUUUUcUgacUUcggUcggaaaaccccU | |
| N5-ESSalt2- | UGGGGGGAGGUAGGUAGGUAGAGGAACCAGCGCUCCACCCCAUCAAUU | 1087 |
| 05 | UUUGGAGcaggUUUUcUgacUUcggUcggaaaaccccU | |
| N5-ESSalt2- | UGGGGGGAGGUAGGUAGGUACAUCCAAGUUGGAGCAAGAUUAUCAAUU | 1088 |
| 06 | UUUGGAGcaggUUUUcUgacUUcggUcggaaaaccccU | |
| N5-ESSalt2- | UGGGGGGAGGUAGGUAGGUAUAUCCUAUACAAAAUAGAAAUAUAAAU | 1089 |
| 07 | UUUUGGAGcaggUUUUcUgacUUcggUcggaaaaccccU | |
| N5-ESSalt2- | UGGGGGGAGGUAGGUAGGUAUAUAUAGUUUGUUAUUAGUUAGAAAAU | 1090 |
| 08 | UUUUGGAGcaggUUUUcUgacUUcggUcggaaaaccccU | |
| N5-ESSalt2- | UGGGGGGAGGUAGGUAGGUAGGGAGGAACCAGCGCUCCACCCCAUCAA | 1091 |
| 09 | UUUUUGGAGcaggUUUUcUgacUUcggUcggaaaaccccU | |
| N5-ESSalt2- | UGGGGGGAGGUAGGUAGGUACCCAUCCAAGUUGGAGCAAGAUUAUCAA | 1092 |
| 10 | UUUUUGGAGcaggUUUUcUgacUUcggUcggaaaaccccU | |
| N5-ESSalt2- | UGGGGGGAGGUAGGUAGGUAAUUAUCCUAUACAAAAUAGAAAUAUAA | 1093 |
| 11 | AUUUUUGGAGcaggUUUUcUgacUUcggUcggaaaaccccU | |
| N5-ESSalt2- | UGGGGGGAGGUAGGUAGGUAUCAGGGGAGGAACCAGCGCUCCACCCCA | 1094 |
| 13 | UCAAUUUUUGGAGcaggUUUUcUgacUUcggUcggaaaaccccU | |
| N5-ESSalt2- | UGGGGGGAGGUAGGUAGGUACCACCCCAUCCAAGUUGGAGCAAGAUUA | 1095 |
| 14 | UCAAUUUUUGGAGcaggUUUUcUgacUUcggUcggaaaaccccU | |
| N5-ESSalt2- | UGGGGGGAGGUAGGUAGGUACAAGAUUAUCCUAUACAAAAUAGAAAUA | 1096 |
| 15 | UAAAUUUUUGGAGcaggUUUUcUgacUUcggUcggaaaaccccU | |
| N3-ESSalt2- | UGGGGGGAGGUAGGUAGGUAAGUGCAAGGAUUAAAGGUAGAAUUUUU | 1097 |
| 01 | GGAGcaggUUUUcUgacUUcggUcggaaaaccccU | |
| N3-ESSalt2- | UGGGGGGAGGUAGGUAGGUACAAAAGGGGUAAUACAGUACAAUUUUU | 1098 |
| 02 | GGAGcaggUUUUcUgacUUcggUcggaaaaccccU | |
| N3-ESSalt2- | UGGGGGGAGGUAGGUAGGUACCAUAAUAAAGGGCUCAGGGAAUUUUUG | 1099 |
| 03 | GAGcaggUUUUcUgacUUcggUcggaaaaccccU | |
| N3-ESSalt2- | UGGGGGGAGGUAGGUAGGUAGAGGAACCAGCGCUCCACCCAAUUUUUG | 1100 |
| 04 | GAGcaggUUUUcUgacUUcggUcggaaaaccccU | |
| N3-ESSalt2- | UGGGGGGAGGUAGGUAGGUAUCACAGUGCAAGGAUUAAAGGUAGAAU | 1101 |
| 05 | UUUUGGAGcaggUUUUcUgacUUcggUcggaaaaccccU | |
| N3-ESSalt2- | UGGGGGGAGGUAGGUAGGUAGUAGCAAAAGGGGUAAUACAGUACAAU | 1102 |
| 06 | UUUUGGAGcaggUUUUcUgacUUcggUcggaaaaccccU | |
| N3-ESSalt2- | UGGGGGGAGGUAGGUAGGUAGUACCCAUAAUAAAGGGCUCAGGGAAUU | 1103 |
| 07 | UUUGGAGcaggUUUUcUgacUUcggUcggaaaaccccU | |
| N3-ESSalt2- | UGGGGGGAGGUAGGUAGGUAAGGGGAGGAACCAGCGCUCCACCCAAUU | 1104 |
| 08 | UUUGGAGcaggUUUUcUgacUUcggUcggaaaaccccU | |
| N3-ESSalt2- | UGGGGGGAGGUAGGUAGGUAAGUCACAGUGCAAGGAUUAAAGGUAGA | 1105 |
| 09 | AUUUUUGGAGcaggUUUUcUgacUUcggUcggaaaaccccU | |
| N3-ESSalt2- | UGGGGGGAGGUAGGUAGGUAAGGUAGCAAAAGGGGUAAUACAGUACA | 1106 |
| 10 | AUUUUUGGAGcaggUUUUcUgacUUcggUcggaaaaccccU | |
| N3-ESSalt2- | UGGGGGGAGGUAGGUAGGUACAGUACCCAUAAUAAAGGGCUCAGGGAA | 1107 |
| 11 | UUUUUGGAGcaggUUUUcUgacUUcggUcggaaaaccccU | |
| N3-ESSalt2- | UGGGGGGAGGUAGGUAGGUACAUAAGUCACAGUGCAAGGAUUAAAGGU | 1108 |
| 13 | AGAAUUUUUGGAGcaggUUUUcUgacUUcggUcggaaaaccccU | |
| N3-ESSalt2- | UGGGGGGAGGUAGGUAGGUAUUAAAGGUAGCAAAAGGGGUAAUACAG | 1109 |
| 14 | UACAAUUUUUGGAGcaggUUUUcUgacUUcggUcggaaaaccccU | |
| N3-ESSalt2- | UGGGGGGAGGUAGGUAGGUAAAUACAGUACCCAUAAUAAAGGGCUCAG | 1110 |
| 15 | GGAAUUUUUGGAGcaggUUUUcUgacUUcggUcggaaaaccccU | |

TABLE 14C
DNA Example U7 snRNA sequences targeting SCN1A mRNA-corresponding with
constructs in Table 3B

| Sequence | | SEQ ID |
|---|---|---|
| Name | snRNA Sequences (5′ to 3′) | NO: |
| 3c5c-24 | AUGAUAGGGACUUAGGGUGAGCACCCCAUCCCCCACUACAAAUUUU | 1111 |
| | UGGAGcaggUUUUcUgacUUcggUcggaaaaccccU | |
| 3c5c-28 | AUGAUAGGGACUUAGGGUGAGUAAUACAGUACCCAUAAUAAAGGAG | 1112 |
| | CAAGAUUAUCCUAUAUAAAAUAAAUUUUUGGAGcaggUUUUcUgacUUc | |
| | ggUcggaaaaccccU | |
| 3c5c-30 | AUGAUAGGGACUUAGGGUGAGGGUAAUACAGUACCCAUAAUAAAGG | 1113 |
| | GCGGAGCAAGAUUAUCCUAUAUAAAAUAGAAAUUUUUGGAGcaggUU | |
| | UUcUgacUUcggUcggaaaaccccU | |
| 3ex5ex-24 | AUGAUAGGGACUUAGGGUGAGGGGUAAUACAGUACCCAUAAUAAAG | 1114 |
| | GGCUUGGAGCAAGAUUAUCCUAUAUAAAAUAGAAAAUUUUUGGAGc | |
| | aggUUUUcUgacUUcggUcggaaaaccccU | |
| 3ex5ex-28 | AUGAUAGGGACUUAGGGUGAAGGGGUAAUACAGUACCCAUAAUAAG | 1115 |
| | AUUAUCCUAUAUAAAAUAGAAAAAUUUUUGGAGcaggUUUUcUgacUUc | |
| | ggUcggaaaaccccU | |
| 3ex5ex-30 | AUGAUAGGGACUUAGGGUGAAAAAGGGGUAAUACAGUACCCAUAAU | 1116 |
| | AAAAGAUUAUCCUAUAUAAAAUAGAAAUAUAAUUUUUGGAGcaggUU | |
| | UUcUgacUUcggUcggaaaaccccU | |
| 3ex5int-24 | UAAACAAGAUUAUCCUAUAUAAAAUAGAAAUAUAAAUUUUUGGAGC | 1117 |
| | aggUUUUcUgacUUcggUcggaaaaccccU | |
| 3ex5int-28 | AUGAUAGGGACUUAGGGUGAUACAGUACCCAUAAUAAAGGGCUGUU | 1118 |
| | GGAGCAAGAUUAUCCUAUAUAAAAUUUUUGGAGcaggUUUUcUgacUUc | |
| | ggUcggaaaaccccU | |
| 3ex5int30 | AUGAUAGGGACUUAGGGUGAAUACAGUACCCAUAAUAAAGGGCUGA | 1119 |
| | GGAAGUUGGAGCAAGAUUAUCCUAUAUAAAAAUUUUUGGAGcaggUU | |
| | UUcUgacUUcggUcggaaaaccccU | |
| 3int5ex-24 | AUGAUAGGGACUUAGGGUGAAAUACAGUACCCAUAAUAAAGGGCUG | 1120 |
| | AGGGCAAGUUGGAGCAAGAUUAUCCUAUAUAAAAAAUUUUUGGAGc | |
| | aggUUUUcUgacUUcggUcggaaaaccccU | |
| 3int5ex-28 | AUGAUAGGGACUUAGGGUGAAGGGGUAAUACAGUACCCAUAAUAUU | 1121 |
| | GGAGCAAGAUUAUCCUAUAUAAAAUUUUUGGAGcaggUUUUcUgacUUc | |
| | ggUcggaaaaccccU | |
| 3int5ex-30 | AUGAUAGGGACUUAGGGUGAAAAAGGGGUAAUACAGUACCCAUAAU | 1122 |
| | AAAAGUUGGAGCAAGAUUAUCCUAUAUAAAAAUUUUUGGAGcaggUU | |
| | UUcUgacUUcggUcggaaaaccccU | |
| 3int5int-24 | AUGAUAGGGACUUAGGGUGACAAAAGGGGUAAUACAGUACCCAUAA | 1123 |
| | UAAACAAGUUGGAGCAAGAUUAUCCUAUAUAAAAAAUUUUUGGAG | |
| | aggUUUUcUgacUUcggUcggaaaaccccU | |
| 3int5int-28 | AUGAUAGGGACUUAGGGUGAUACAGUACCCAUAAUAAAGGGCUGAG | 1124 |
| | AUUAUCCUAUAUAAAAUAGAAAAAUUUUUGGAGcaggUUUUcUgacUUc | |
| | ggUcggaaaaccccU | |
| 3int5int-30 | AUGAUAGGGACUUAGGGUGAAUACAGUACCCAUAAUAAAGGGCUGA | 1125 |
| | GGAAGAUUAUCCUAUAUAAAAUAGAAAUAUAAUUUUUGGAGcaggUU | |
| | UUcUgacUUcggUcggaaaaccccU | |

[0275] While preferred embodiments of the present invention have been shown and described herein, it will be obvious to those skilled in the art that such embodiments are provided by way of example only. Numerous variations, changes, and substitutions will now occur to those skilled in the art without departing from the invention. It should be understood that various alternatives to the embodiments of the invention described herein may be employed in practicing the invention. It is intended that the following claims define the scope of the invention and that methods and structures within the scope of these claims and their equivalents be covered thereby.

1. A nucleic acid expression system, comprising:
a regulatory sequence operably coupled to a transcribable region of a nucleic acid, the regulatory sequence comprising a proximal regulatory sequence element (PSE) and a distal regulatory sequence element (DSE);
wherein the PSE comprises a PSE sequence of a first small nuclear RNA (snRNA) of a first organism species, wherein the DSE comprises a DSE sequence of a second small nuclear RNA (snRNA) of a second organism species, and wherein the first and second snRNAs are different or wherein the first and second organism species are different.

2. The system of claim 1, wherein the first snRNA is selected from the group consisting of snRNA U2, snRNA U3, snRNA U12, snRNA U1, snRNA U4, snRNA U5, snRNA U6, snRNA U7, snRNA U11, and snRNA 7SK.

3. The system of claim 1, wherein the second snRNA is selected from the group consisting of snRNA U2 snRNA U3, snRNA U12, snRNAU1, snRNA U4, snRNA U5, snRNA U6, snRNA U1, snRNA U11, and snRNA 7SK.

4. The system of claim 1, wherein the first organism species is selected from the group consisting of human and mouse.

5. The system of claim 1, wherein the second organism species is selected from the group consisting of mouse and human.

6. The system of claim 1, wherein:
the first snRNA is selected from the group consisting of snRNA U2, snRNA U3, snRNA U12, snRNA U1, snRNA U4, snRNA U5, snRNA U6, snRNA U7, snRNA U11, and snRNA 7SK;
the second snRNA is selected from the group consisting of snRNA U2, snRNA U3, snRNA U12, snRNA U1, snRNA U4, snRNA U5, snRNA U6, snRNA U7, snRNA U11, and snRNA 7SK;
the first organism species is selected from the group consisting of human and mouse; and
the second organism species is selected from the group consisting of mouse and human.

7. The system of claim 1, wherein the regulatory sequence comprises a promoter sequence.

8. The system of claim 6, wherein the regulatory sequence comprises a promoter sequence.

9. The system of claim 1, wherein the regulatory sequence comprises a terminator sequence.

10. The system of claim 6, wherein the regulatory sequence comprises a terminator sequence.

11. A nucleic acid expression system, comprising:
a regulatory sequence operably coupled to a transcribable region of a nucleic acid, the regulatory sequence comprising a proximal regulatory sequence element (PSE) and a distal regulatory sequence element (DSE);
wherein the PSE comprises a mouse U3 snRNA (“MmU3”) PSE, mouse U2 snRNA (“MmU2”) PSE, a mouse U11 snRNA (“MmU11”) PSE, a mouse U1 snRNA (“MmU1) PSE, a mouse U4 snRNA (“MmU4”) PSE, a mouse U5 snRNA (“MmU5”) PSE, a mouse U6 snRNA (“MmU6”) PSE, a mouse U7 snRNA (“MmU7”) PSE, a mouse U12 snRNA (“MmU12”) PSE, a mouse U7SK snRNA (“MmU7SK”) PSE, a human U12 snRNA (“HsU12”) PSE, a human U1 snRNA (“HsU1”) PSE, a human U2 snRNA (“HsU2”) PSE, a human U3 snRNA (“HsU3”) PSE, a human U4 snRNA (“HsU4”) PSE, a human U5 snRNA (“HsU5”) PSE, a human U6 snRNA (“HsU6”) PSE, a human U7 snRNA (“HsU7”) PSE, a human U11 snRNA (“HsU11”) PSE, or a human U7SK snRNA (“HsU7SK”) PSE;
wherein the DSE comprises a mouse U3 snRNA (“MmU3”) DSE, mouse U2 snRNA (“MmU2”) DSE, a mouse U11 snRNA (“MmU11”) DSE, a mouse U1 snRNA (“MmU1) DSE, a mouse U4 snRNA (“MmU4”) DSE, a mouse U5 snRNA (“MmU5”) DSE, a mouse U6 snRNA (“MmU6”) DSE, a mouse U7 snRNA (“MmU7”) DSE, a mouse U12 snRNA (“MmU12”) DSE, a mouse U7SK snRNA (“MmU7SK”) DSE, a human U12 snRNA (“HsU12”) DSE, a human U1 snRNA (“HsU1”) DSE, a human U2 snRNA (“HsU2”) DSE, a human U3 snRNA (“HsU3”) DSE, a human U4 snRNA (“HsU4”) DSE, a human U5 snRNA (“HsU5”) DSE, a human U6 snRNA (“HsU6”) DSE, a human U7 snRNA (“HsU7”) DSE, a human U11 snRNA (“HsU11”) DSE, or a human U7SK snRNA (“HsU7SK”) DSE; and
wherein the PSE and the DSE are from a different species as each other, or from a different snRNA as each other.

12. The system of claim 11, wherein the PSE and the DSE are from a different species as each other, and from a different snRNA as each other.

13. The system of claim 11, wherein the regulatory sequence comprises a promoter sequence.

14. The system of claim 11, wherein the regulatory sequence comprises a terminator sequence.

15. A nucleic acid expression system, comprising:
a promoter sequence comprising a promoter proximal sequence element (PSE) and a promoter distal sequence element (DSE);
wherein the promoter PSE comprises a mouse U3 snRNA (“MmU3”) promoter PSE, mouse U2 snRNA (“MmU2”) promoter PSE, a mouse U11 snRNA (“MmU11”) promoter PSE, a mouse U1 snRNA (“MmU1) promoter PSE, a mouse U4 snRNA (“MmU4”) promoter PSE, a mouse U5 snRNA (“MmU5”) promoter PSE, a mouse U6 snRNA (“MmU6”) promoter PSE, a mouse U7 snRNA (“MmU7”) promoter PSE, a mouse U12 snRNA (“MmU12”) promoter PSE, a mouse U7SK snRNA (“MmU7SK”) promoter PSE, a human U12 snRNA (“HsU12”) promoter PSE, a human U1 snRNA (“HsU1”) promoter PSE, a human U2 snRNA (“HsU2”) promoter PSE, a human U3 snRNA (“HsU3”) promoter PSE, a human U4 snRNA (“HsU4”) promoter PSE, a human U5 snRNA (“HsU5”) promoter PSE, a human U6 snRNA (“HsU6”) promoter PSE, a human U7 snRNA (“HsU7”) promoter PSE, a human U11 snRNA (“HsU11”) promoter PSE, or a human U7SK snRNA (“HsU7SK”) promoter PSE;
wherein the promoter DSE comprises a mouse U3 snRNA (“MmU3”) promoter DSE, mouse U2 snRNA (“MmU2”) promoter DSE, a mouse U11 snRNA (“MmU11”) promoter DSE, a mouse U1 snRNA (“MmU1) promoter DSE, a mouse U4 snRNA (“MmU4”) promoter DSE, a mouse U5 snRNA (“MmU5”) promoter DSE, a mouse U6 snRNA (“MmU6”) promoter DSE, a mouse U7 snRNA (“MmU7”) promoter DSE, a mouse U12 snRNA (“MmU12”) promoter DSE, a mouse U7SK snRNA (“MmU7SK”) promoter DSE, a human U12 snRNA (“HsU12”) promoter DSE, a human U1 snRNA (“HsU1”) promoter DSE, a human U2 snRNA (“HsU2”) promoter DSE, a human U3 snRNA (“HsU3”) promoter DSE, a human U4 snRNA (“HsU4”) promoter DSE, a human U5 snRNA (“HsU5”) promoter DSE, a human U6 snRNA (“HsU6”) promoter DSE, a human U7 snRNA (“HsU7”) promoter DSE, a human U11 snRNA (“HsU1”) promoter DSE, or a human U7SK snRNA (“HsU7SK”) promoter DSE; and
wherein the promoter PSE and the promoter DSE are from a different species as each other, or from a different snRNA as each other.

16. The system of claim 15, wherein the promoter PSE and the promoter DSE are from a different species as each other, and from a different snRNA as each other.

17. The system of claim 15, further comprising a transcribable region operably coupled to the promoter sequence.

18. The system of claim 17, further comprising a terminator sequence 3′ to the transcribable region.

19. A nucleic acid expression system, comprising:
a terminator sequence 3′ to a transcribable region, the terminator sequence comprising a terminator proximal sequence element (PSE) and a terminator distal sequence element (DSE);
wherein the PSE comprises a mouse U5 snRNA (“MmU5”) terminator PSE, a mouse U1 snRNA (“MmU1”) terminator PSE, a mouse U11 snRNA (“MmU11”) terminator PSE, a mouse U4 snRNA (“MmU4”) terminator PSE, a mouse U2 snRNA (“MmU2”) terminator PSE, a mouse U6 snRNA (“MmU6”) terminator PSE, a mouse U7 snRNA (“MmU7”) terminator PSE, a mouse U3 snRNA (“MmU3”) terminator PSE, a mouse U12 snRNA (“MmU12”) terminator PSE, a mouse U7SK snRNA (“MmU7SK”) terminator PSE, a human U1 snRNA (“HsU1”) terminator PSE, a human U5 snRNA (“HsU5”) terminator PSE, a human U12 snRNA (“HsU12”) terminator PSE, a human U4 snRNA (“HsU4”) terminator PSE, a human U2 snRNA (“HsU2”) terminator PSE, a human U6 snRNA (“HsU6”) terminator PSE, a human U7 snRNA (“HsU7”) terminator PSE, a human U11 snRNA (“HsU11”) terminator PSE, a human U3 snRNA (“HsU3”) terminator PSE, or a human U7SK snRNA (“HsU7SK”) terminator PSE;
wherein the DSE comprises a mouse U5 snRNA (“MmU5”) terminator DSE, a mouse U1 snRNA (“MmU1”) terminator DSE, a mouse U11 snRNA (“MmU11”) terminator DSE, a mouse U4 snRNA (“MmU4”) terminator DSE, a mouse U2 snRNA (“MmU2”) terminator DSE, a mouse U6 snRNA (“MmU6”) terminator DSE, a mouse U7 snRNA (“MmU7”) terminator DSE, a mouse U3 snRNA (“MmU3”) terminator DSE, a mouse U12 snRNA (“MmU12”) terminator DSE, a mouse U7SK snRNA (“MmU7SK”) terminator DSE, a human U1 snRNA (“HsU1”) terminator DSE, a human U5 snRNA (“HsU5”) terminator DSE, a human U12 snRNA (“HsU12”) terminator DSE, a human U4 snRNA (“HsU4”) terminator DSE, a human U2 snRNA (“HsU2”) terminator DSE, a human U6 snRNA (“HsU6”) terminator DSE, a human U7 snRNA (“HsU7”) terminator DSE, a human U11 snRNA (“HsU11”) terminator DSE, a human U3 snRNA (“HsU3”) terminator DSE, or a human U7SK snRNA (“HsU7SK”) terminator DSE; and
wherein the terminator PSE and the terminator DSE are from a different species as each other, or from a different snRNA as each other.

20. The system of claim 19, wherein the terminator PSE and the terminator DSE are from a different species as each other, and from a different snRNA as each other.

21. The system of claim 19, further comprising a promoter sequence, wherein the transcribable region is operably coupled to the promoter sequence.

22. A nucleic acid expression system, comprising:
a promoter sequence operably coupled to a transcribable region of a nucleic acid, and a terminator sequence coupled to the transcribable region;
wherein the promoter sequence comprises a promoter sequence of a first small nuclear RNA (snRNA) of a first organism species, wherein the terminator sequence comprises a terminator sequence of a second small nuclear RNA (snRNA) of a second organism species, and wherein the first and second snRNAs are different or wherein the first and second organism species are different.

23. The system of claim 22, wherein the first snRNA is selected from the group consisting of snRNA U12, snRNA U3, snRNA U2, snRNA U4, snRNA U5, snRNA U6, snRNA U7, snRNA U11, snRNA U1 and snRNA 7SK.

24. The system of claim 22, wherein the first snRNA is selected from the group consisting of snRNA U12, snRNA U3, snRNA U2, snRNA U4, snRNA U5, snRNA U6, snRNA U7, snRNA U11, snRNA U1 and snRNA 7SK.

25. The system of claim 22, wherein:
the first snRNA is selected from the group consisting of snRNA U12, snRNA U3, snRNA U2, snRNA U4, snRNA U5, snRNA U6, snRNA U7, snRNA U11, snRNA U1 and snRNA 7SK;
the second snRNA is selected from the group consisting of the first snRNA is selected from the group consisting of snRNA U12, snRNA U3, snRNA U2, snRNA U4, snRNA U5, snRNA U6, snRNA U7, snRNA U11, snRNA U1 and snRNA 7SK;
the first organism species is selected from the group consisting of human and mouse; and
the second organism species is selected from the group consisting of mouse and human.

26. The system of claim 22, wherein the promoter comprises a promoter PSE sequence and a promoter DSE sequence, and wherein the either the promoter PSE or the promoter DSE is of a different organism species than the first organism species.

27. The system of claim 22, wherein the promoter comprises a promoter PSE sequence and a promoter DSE sequence, and wherein the either the promoter PSE or the promoter DSE is of a different snRNA than the first snRNA.

28. The system of claim 22, wherein the promoter comprises a promoter PSE sequence and a promoter DSE sequence, and wherein the either the promoter PSE or the promoter DSE is of a different organism species than the first organism species; and
wherein the promoter comprises a promoter PSE sequence and a promoter DSE sequence, and wherein the either the promoter PSE or the promoter DSE is of a different snRNA than the first snRNA.

29. The system of claim 22, wherein the terminator comprises a terminator PSE sequence and a terminator DSE sequence, and wherein the either the terminator PSE or the terminator DSE is of a different organism species than the second organism species.

30. The system of claim 22, wherein the terminator comprises a terminator PSE sequence and a terminator DSE sequence, and wherein the either the terminator PSE or the terminator DSE is of a different snRNA than the second snRNA.

31. The system of claim 22, wherein the terminator comprises a terminator PSE sequence and a terminator DSE sequence, and wherein the either the terminator PSE or the terminator DSE is of a different organism species than the second organism species; and
wherein the terminator comprises a terminator PSE sequence and a terminator DSE sequence, and wherein the either the terminator PSE or the terminator DSE is of a different snRNA than the second snRNA.

32. The system of claim 22, wherein the promoter comprises a promoter PSE sequence and a promoter DSE sequence, and wherein the either the promoter PSE or the promoter DSE is of a different organism species than the first organism species; and
wherein the promoter comprises a promoter PSE sequence and a promoter DSE sequence, and wherein the either the promoter PSE or the promoter DSE is of a different snRNA than the first snRNA;
wherein the terminator comprises a terminator PSE sequence and a terminator DSE sequence, and wherein the either the terminator PSE or the terminator DSE is of a different organism species than the second organism species; and
wherein the terminator comprises a terminator PSE sequence and a terminator DSE sequence, and wherein the either the terminator PSE or the terminator DSE is of a different snRNA than the second snRNA.

33. A nucleic acid expression system, comprising:
a promoter sequence comprising a mouse U3 snRNA (“MmU3”) promoter sequence, a mouse U2 snRNA (“MmU2”) promoter sequence, a mouse U11 snRNA (“MmU11”) promoter sequence, a mouse U4 snRNA (“MmU4”) promoter sequence, a mouse U5 snRNA (“MmU5”) promoter sequence, a mouse U6 snRNA (“MmU6”) promoter sequence, a mouse U7 snRNA (“MmU7”) promoter sequence, a mouse U1 snRNA (“MmU1”) promoter sequence, a mouse U12 snRNA (“MmU12”) promoter sequence, a mouse U7SK snRNA (“MmU7SK”) promoter sequence, a human U12 snRNA (“HsU12”) promoter sequence, a human U1 snRNA (“HsU1”) promoter sequence, a human U2 snRNA (“HsU2”) promoter sequence, a human U4 snRNA (“HsU4”) promoter sequence, a human U5 snRNA (“HsU5”) promoter sequence, a human U6 snRNA (“HsU6”) promoter sequence, a human U7 snRNA (“HsU7”) promoter sequence, a human U11 snRNA (“HsU11”) promoter sequence, a human U3 snRNA (“HsU3”) promoter sequence, or a human U7SK snRNA (“HsU7SK”) promoter sequence, or a fragment or combination of fragments thereof; and
a transcribable region operably coupled to the promoter sequence and to a terminator sequence comprising a mouse U5 snRNA (“MmU5”) terminator sequence, a mouse U1 snRNA (“MmU1”) terminator sequence, a mouse U11 snRNA (“MmU11”) terminator sequence, a mouse U4 snRNA (“MmU4”) terminator sequence, a mouse U2 snRNA (“MmU2”) terminator sequence, a mouse U6 snRNA (“MmU6”) terminator sequence, a mouse U7 snRNA (“MmU7”) terminator sequence, a mouse U3 snRNA (“MmU3”) terminator sequence, a mouse U12 snRNA (“MmU12”) terminator sequence, a mouse U7SK snRNA (“MmU7SK”) terminator sequence, a human U1 snRNA (“HsU1”) terminator sequence, a human U5 snRNA (“HsU5”) terminator sequence, a human U12 snRNA (“HsU12”) terminator sequence, a human U4 snRNA (“HsU4”) terminator sequence, a human U2 snRNA (“HsU2”) terminator sequence, a human U6 snRNA (“HsU6”) terminator sequence, a human U7 snRNA (“HsU7”) terminator sequence, a human U11 snRNA (“HsU11”) terminator sequence, a human U3 snRNA (“HsU3”) terminator sequence, or a human U7SK snRNA (“HsU7SK”) terminator sequence, or a fragment or combination of fragments thereof;
wherein the promoter sequence and the terminator sequence are at least partially of a different organism species as each other, or are at least partially of a different snRNA as each other.

34. The system of claim 33, wherein the promoter sequence and the terminator sequence are at least partially of a different organism species as each other, and are at least partially of a different snRNA as each other.

35. The system of any one claims 1-14 or 17-34, wherein the expression system produces a greater amount of RNA from the transcribable region than an expression system having a wild-type promoter and wild-type terminator operably coupled to the transcribable region.

36. The system of claim 35, wherein the amount of RNA produced is at least 10% greater.

37. A method of producing a ribonucleic acid (RNA), comprising contacting a cell with the expression system of any one claims 1-34.

The application's sequence listing, which the Patent Office published only in electronic form, follows.

SEQUENCE LISTING (1125 sequences)

SEQ ID NO: 1 - DNA, 64 bp, Mus musculus
  source 1..64: mol_type = genomic DNA
gataatcttgctccaacttggatggggtggagcggtggttcctcccctcagccctttattatgg

SEQ ID NO: 2 - DNA, 64 bp, Homo sapiens
  source 1..64: mol_type = genomic DNA
gataatcttgctccaacttggatggggtggagcgctggttcctcccctgagccctttattatgg

SEQ ID NO: 3 - RNA, 45 nt, Homo sapiens
  source 1..45: mol_type = unassigned RNA
annaatttttggagcaggttttctgacttcggtcggaaaacccct

SEQ ID NO: 4 - RNA, 31 nt, Homo sapiens
  source 1..31: mol_type = unassigned RNA
caggttttctgacttcggtcggaaaacccct

SEQ ID NO: 5 - DNA, 255 bp, Mus musculus
  source 1..255: mol_type = genomic DNA
aacaacataggagctgtgattggctgttttcagccaatcagcactgactcatttgcatagcctttacaagcggtcacaaactcaagaaacgagcggttttaatagtcttttagaatattgtttatcgaaccgaataaggaactgtgctttgtgattcacatatcagtggaggggtgtggaaatggcaccttgatctcaccctcatcgaaagtggagttgatgtccttccctggctcgctacagacgcacttccgc

SEQ ID NO: 6 - DNA, 411 bp, Mus musculus
  source 1..411: mol_type = genomic DNA
taaagactgtgcatccgactcctacatttatgaaagtaaatgcctattgttagaacaaaaaaggctacagaacaaaaaacaaagcgaaataccatctgctttaggttcagtggtattttcccgctgacagggaggcgggtttttgggtacaggaaacgagtcactatggaggcggtactatgtagatgagaattcaggagcaaactgggaaaagcaactgcttccaaatatttgtgatttttacagtgtagttttggaaaaactcttagcctaccaattcttctaagtgttttaaaatgtgggagccagtacacatgaagttatagagtgttttaatgaggcttaaatatttaccgtaactatgaaatgctacgcatatcatgctgttcaggctccgtggccacgcaactc

SEQ ID NO: 7 - DNA, 297 bp, Homo sapiens
  source 1..297: mol_type = genomic DNA
aacaacataggagctgtgattggctgttttcagccaatcagcactgactcagggcgacttctatgtagatgaggcagcgcagaggctgctgcctttacaagcggtcacaaactcaagaaacgagcggttttaatagtcttttagaatattgtttatcgaaccgaataaggaactgtgctttgtgattcacatatcagtggaggggtgtggaaatggcaccttgatgggagtgcgcgaggcaagtgaccgtgtgtggagttgatgtccttccctggctcgctacagacgcacttccgc

SEQ ID NO: 8 - DNA, 286 bp, Mus musculus
  source 1..286: mol_type = other DNA
aacaacataggagctgtgattggctgttttcagccaatcagcactgactcagggcgacttctatgtagatgaggcagcgcagaggctgctgcctttacaagcggtcacaaactcaagaaacgagcggttttaatagtcttttagaatattgtttatcgaaccgaataaggaactgtgctttgtgattcacatatcagtggaggggtgtggaaatggcaccttgatttaccgtaactatgaaatggagttgatgtccttccctggctcgctacagacgcacttccgc

SEQ ID NO: 9 - DNA, 104 bp, Mus musculus
  source 1..104: mol_type = unassigned DNA
cccaatttcactggtctacaatgaaagcaaaacagttctcttccccgctccccggtgtgtgagaggggctttgatccttctctggtttcctaggaaacgcgtat

SEQ ID NO: 10 - DNA, 35 bp, Homo sapiens
  source 1..35: mol_type = unassigned DNA
actttctggagtttcaaaagtagactgtacgctaa

SEQ ID NO: 11 - DNA, 20 bp, Homo sapiens
  source 1..20: mol_type = genomic DNA
atgatagggacttagggtga

SEQ ID NO: 12 - DNA, 20 bp, Homo sapiens
  source 1..20: mol_type = genomic DNA
tttgttccgtgggtggttta

SEQ ID NO: 13 - DNA, 20 bp, Homo sapiens
  source 1..20: mol_type = genomic DNA
tggggggaggtaggtaggta

SEQ ID NO: 14 - RNA, 20 nt, Mus musculus
  source 1..20: mol_type = unassigned RNA
gcaccccatcccccactaca

SEQ ID NO: 15 - RNA, 20 nt, Mus musculus
  source 1..20: mol_type = unassigned RNA
ggagaatcaccttataggat

SEQ ID NO: 16 - RNA, 20 nt, Mus musculus
  source 1..20: mol_type = unassigned RNA
gaataataacataataatat

SEQ ID NO: 17 - RNA, 20 nt, Mus musculus
  source 1..20: mol_type = unassigned RNA
gaaatttatgtattgattat

SEQ ID NO: 18 - RNA, 20 nt, Mus musculus
  source 1..20: mol_type = unassigned RNA
aaccaccgctccaccccatc

SEQ ID NO: 19 - RNA, 20 nt, Mus musculus
  source 1..20: mol_type = unassigned RNA
caagttggagcaagattatc

SEQ ID NO: 20 - RNA, 20 nt, Mus musculus
  source 1..20: mol_type = unassigned RNA
ctatataaaatagaaatata

SEQ ID NO: 21 - RNA, 20 nt, Mus musculus
  source 1..20: mol_type = unassigned RNA
tagtttattattagttagaa

SEQ ID NO: 22 - RNA, 24 nt, Mus musculus
  source 1..24: mol_type = unassigned RNA
gaggaaccaccgctccaccccatc

SEQ ID NO: 23 - RNA, 24 nt, Mus musculus
  source 1..24: mol_type = unassigned RNA
catccaagttggagcaagattatc

SEQ ID NO: 24 - RNA, 24 nt, Mus musculus
  source 1..24: mol_type = unassigned RNA
tatcctatataaaatagaaatata

SEQ ID NO: 25 - RNA, 24 nt, Mus musculus
  source 1..24: mol_type = unassigned RNA
tatatagtttattattagttagaa

SEQ ID NO: 26 - RNA, 26 nt, Mus musculus
  source 1..26: mol_type = unassigned RNA
gggaggaaccaccgctccaccccatc

SEQ ID NO: 27 - RNA, 26 nt, Mus musculus
  source 1..26: mol_type = unassigned RNA
cccatccaagttggagcaagattatc

SEQ ID NO: 28 - RNA, 26 nt, Mus musculus
  source 1..26: mol_type = unassigned RNA
attatcctatataaaatagaaatata

SEQ ID NO: 29 - RNA, 26 nt, Mus musculus
  source 1..26: mol_type = unassigned RNA
aatatatagtttattattagttagaa

SEQ ID NO: 30 - RNA, 30 nt, Mus musculus
  source 1..30: mol_type = unassigned RNA
tgaggggaggaaccaccgctccaccccatc

SEQ ID NO: 31 - RNA, 30 nt, Mus musculus
  source 1..30: mol_type = unassigned RNA
ccaccccatccaagttggagcaagattatc

SEQ ID NO: 32 - RNA, 30 nt, Mus musculus
  source 1..30: mol_type = unassigned RNA
caagattatcctatataaaatagaaatata

SEQ ID NO: 33 - RNA, 30 nt, Mus musculus
  source 1..30: mol_type = unassigned RNA
tagaaatatatagtttattattagttagaa

SEQ ID NO: 34 - RNA, 20 nt, Mus musculus
  source 1..20: mol_type = unassigned RNA
agtgcaaggattaaaggtag

SEQ ID NO: 35 - RNA, 20 nt, Mus musculus
  source 1..20: mol_type = unassigned RNA
caaaaggggtaatacagtac

SEQ ID NO: 36 - RNA, 20 nt, Mus musculus
  source 1..20: mol_type = unassigned RNA
ccataataaagggctgaggg

SEQ ID NO: 37 - RNA, 20 nt, Mus musculus
  source 1..20: mol_type = unassigned RNA
gaggaaccaccgctccaccc

SEQ ID NO: 38 - RNA, 24 nt, Mus musculus
  source 1..24: mol_type = unassigned RNA
tcacagtgcaaggattaaaggtag

SEQ ID NO: 39 - RNA, 24 nt, Mus musculus
  source 1..24: mol_type = unassigned RNA
gtagcaaaaggggtaatacagtac

SEQ ID NO: 40 - RNA, 24 nt, Mus musculus
  source 1..24: mol_type = unassigned RNA
gtacccataataaagggctgaggg

SEQ ID NO: 41 - RNA, 24 nt, Mus musculus
  source 1..24: mol_type = unassigned RNA
aggggaggaaccaccgctccaccc

SEQ ID NO: 42 - RNA, 26 nt, Mus musculus
  source 1..26: mol_type = unassigned RNA
agtcacagtgcaaggattaaaggtag

SEQ ID NO: 43 - RNA, 26 nt, Mus musculus
  source 1..26: mol_type = unassigned RNA
aggtagcaaaaggggtaatacagtac

SEQ ID NO: 44 - RNA, 26 nt, Mus musculus
  source 1..26: mol_type = unassigned RNA
cagtacccataataaagggctgaggg

SEQ ID NO: 45 - RNA, 26 nt, Mus musculus
  source 1..26: mol_type = unassigned RNA
tgaggggaggaaccaccgctccaccc

SEQ ID NO: 46 - RNA, 30 nt, Mus musculus
  source 1..30: mol_type = unassigned RNA
cataagtcacagtgcaaggattaaaggtag

SEQ ID NO: 47 - RNA, 30 nt, Mus musculus
  source 1..30: mol_type = unassigned RNA
ttaaaggtagcaaaaggggtaatacagtac

SEQ ID NO: 48 - RNA, 30 nt, Mus musculus
  source 1..30: mol_type = unassigned RNA
aatacagtacccataataaagggctgaggg

SEQ ID NO: 49 - RNA, 30 nt, Mus musculus
  source 1..30: mol_type = unassigned RNA
gggctgaggggaggaaccaccgctccaccc

SEQ ID NO: 50 - RNA, 20 nt, Homo sapiens
  source 1..20: mol_type = unassigned RNA
ctatacaaaatagaaatata

SEQ ID NO: 51 - RNA, 20 nt, Homo sapiens
  source 1..20: mol_type = unassigned RNA
tagtttgttattagttagaa

SEQ ID NO: 52 - RNA, 24 nt, Homo sapiens
  source 1..24: mol_type = unassigned RNA
gaggaaccagcgctccaccccatc

SEQ ID NO: 53 - RNA, 24 nt, Homo sapiens
  source 1..24: mol_type = unassigned RNA
tatcctatacaaaatagaaatata

SEQ ID NO: 54 - RNA, 24 nt, Homo sapiens
  source 1..24: mol_type = unassigned RNA
tatatagtttgttattagttagaa

SEQ ID NO: 55 - RNA, 26 nt, Homo sapiens
  source 1..26: mol_type = unassigned RNA
gggaggaaccagcgctccaccccatc

SEQ ID NO: 56 - RNA, 26 nt, Homo sapiens
  source 1..26: mol_type = unassigned RNA
attatcctatacaaaatagaaatata

SEQ ID NO: 57 - RNA, 26 nt, Homo sapiens
  source 1..26: mol_type = unassigned RNA
aatatatagtttgttattagttagaa

SEQ ID NO: 58 - RNA, 30 nt, Homo sapiens
  source 1..30: mol_type = unassigned RNA
tcaggggaggaaccagcgctccaccccatc

SEQ ID NO: 59 - RNA, 30 nt, Homo sapiens
  source 1..30: mol_type = unassigned RNA
caagattatcctatacaaaatagaaatata

SEQ ID NO: 60 - RNA, 30 nt, Homo sapiens
  source 1..30: mol_type = unassigned RNA
tagaaatatatagtttgttattagttagaa

SEQ ID NO: 61 - RNA, 20 nt, Homo sapiens
  source 1..20: mol_type = unassigned RNA
ccataataaagggctcaggg

SEQ ID NO: 62 - RNA, 20 nt, Homo sapiens
  source 1..20: mol_type = unassigned RNA
gaggaaccagcgctccaccc

SEQ ID NO: 63 - RNA, 24 nt, Homo sapiens
  source 1..24: mol_type = unassigned RNA
gtacccataataaagggctcaggg

SEQ ID NO: 64 - RNA, 24 nt, Homo sapiens
  source 1..24: mol_type = unassigned RNA
aggggaggaaccagcgctccaccc

SEQ ID NO: 65 - RNA, 26 nt, Homo sapiens
  source 1..26: mol_type = unassigned RNA
cagtacccataataaagggctcaggg

SEQ ID NO: 66 - RNA, 26 nt, Homo sapiens
  source 1..26: mol_type = unassigned RNA
tcaggggaggaaccagcgctccaccc

SEQ ID NO: 67 - RNA, 30 nt, Homo sapiens
  source 1..30: mol_type = unassigned RNA
aatacagtacccataataaagggctcaggg

SEQ ID NO: 68 - RNA, 30 nt, Homo sapiens
  source 1..30: mol_type = unassigned RNA
gggctcaggggaggaaccagcgctccaccc

SEQ ID NO: 69 - RNA, 20 nt, Homo sapiens
  source 1..20: mol_type = unassigned RNA
aaccagcgctccaccccatc

SEQ ID NO: 70 - RNA, 20 nt, Homo sapiens
  source 1..20: mol_type = unassigned RNA
ctatacaaaatagaaatata

SEQ ID NO: 71 - RNA, 20 nt, Homo sapiens
  source 1..20: mol_type = unassigned RNA
tagtttgttattagttagaa

SEQ ID NO: 72 - RNA, 24 nt, Homo sapiens
  source 1..24: mol_type = unassigned RNA
gaggaaccagcgctccaccccatc

SEQ ID NO: 73 - RNA, 24 nt, Homo sapiens
  source 1..24: mol_type = unassigned RNA
tatcctatacaaaatagaaatata

SEQ ID NO: 74 - RNA, 24 nt, Homo sapiens
  source 1..24: mol_type = unassigned RNA
tatatagtttgttattagttagaa

SEQ ID NO: 75 - RNA, 26 nt, Homo sapiens
  source 1..26: mol_type = unassigned RNA
gggaggaaccagcgctccaccccatc

SEQ ID NO: 76 - RNA, 26 nt, Homo sapiens
  source 1..26: mol_type = unassigned RNA
attatcctatacaaaatagaaatata

SEQ ID NO: 77 - RNA, 26 nt, Homo sapiens
  source 1..26: mol_type = unassigned RNA
aatatatagtttgttattagttagaa

SEQ ID NO: 78 - RNA, 30 nt, Homo sapiens; identical to SEQ ID NO: 58
  source 1..30: mol_type = unassigned RNA

SEQ ID NO: 79 - RNA, 30 nt, Homo sapiens; identical to SEQ ID NO: 59
  source 1..30: mol_type = unassigned RNA

SEQ ID NO: 80 - RNA, 30 nt, Homo sapiens; identical to SEQ ID NO: 60
  source 1..30: mol_type = unassigned RNA

SEQ ID NO: 81 - RNA, 20 nt, Homo sapiens
  source 1..20: mol_type = unassigned RNA
ccataataaagggctcaggg

SEQ ID NO: 82 - RNA, 20 nt, Homo sapiens
  source 1..20: mol_type = unassigned RNA
gaggaaccagcgctccaccc

SEQ ID NO: 83 - RNA, 24 nt, Homo sapiens
  source 1..24: mol_type = unassigned RNA
gtacccataataaagggctcaggg

SEQ ID NO: 84 - RNA, 24 nt, Homo sapiens
  source 1..24: mol_type = unassigned RNA
aggggaggaaccagcgctccaccc

SEQ ID NO: 85 - RNA, 26 nt, Homo sapiens
  source 1..26: mol_type = unassigned RNA
cagtacccataataaagggctcaggg

SEQ ID NO: 86 - RNA, 26 nt, Homo sapiens
  source 1..26: mol_type = unassigned RNA
tcaggggaggaaccagcgctccaccc

SEQ ID NO: 87 - RNA, 30 nt, Homo sapiens; identical to SEQ ID NO: 67
  source 1..30: mol_type = unassigned RNA

SEQ ID NO: 88 - RNA, 30 nt, Homo sapiens; identical to SEQ ID NO: 68
  source 1..30: mol_type = unassigned RNA

SEQ ID NO: 89 - RNA, 20 nt, Homo sapiens
  source 1..20: mol_type = unassigned RNA
aaccagcgctccaccccatc

SEQ ID NO: 90 - RNA, 20 nt, Homo sapiens
  source 1..20: mol_type = unassigned RNA
ctatacaaaatagaaatata

SEQ ID NO: 91 - RNA, 20 nt, Homo sapiens
  source 1..20: mol_type = unassigned RNA
tagtttgttattagttagaa

SEQ ID NO: 92 - RNA, 24 nt, Homo sapiens
  source 1..24: mol_type = unassigned RNA
gaggaaccagcgctccaccccatc

SEQ ID NO: 93 - RNA, 24 nt, Homo sapiens
  source 1..24: mol_type = unassigned RNA
tatcctatacaaaatagaaatata

SEQ ID NO: 94 - RNA, 24 nt, Homo sapiens
  source 1..24: mol_type = unassigned RNA
tatatagtttgttattagttagaa

SEQ ID NO: 95 - RNA, 26 nt, Homo sapiens
  source 1..26: mol_type = unassigned RNA
gggaggaaccagcgctccaccccatc

SEQ ID NO: 96 - RNA, 26 nt, Homo sapiens
  source 1..26: mol_type = unassigned RNA
attatcctatacaaaatagaaatata

SEQ ID NO: 97 - RNA, 30 nt, Homo sapiens; identical to SEQ ID NO: 58
  source 1..30: mol_type = unassigned RNA

SEQ ID NO: 98 - RNA, 30 nt, Homo sapiens; identical to SEQ ID NO: 59
  source 1..30: mol_type = unassigned RNA

SEQ ID NO: 99 - RNA, 20 nt, Homo sapiens
  source 1..20: mol_type = unassigned RNA
ccataataaagggctcaggg

SEQ ID NO: 100 - RNA, 20 nt, Homo sapiens
  source 1..20: mol_type = unassigned RNA
gaggaaccagcgctccaccc

SEQ ID NO: 101 - RNA, 24 nt, Homo sapiens
  source 1..24: mol_type = unassigned RNA
gtacccataataaagggctcaggg

SEQ ID NO: 102 - RNA, 24 nt, Homo sapiens
  source 1..24: mol_type = unassigned RNA
aggggaggaaccagcgctccaccc

SEQ ID NO: 103 - RNA, 26 nt, Homo sapiens
  source 1..26: mol_type = unassigned RNA
cagtacccataataaagggctcaggg

SEQ ID NO: 104 - RNA, 30 nt, Homo sapiens; identical to SEQ ID NO: 67
  source 1..30: mol_type = unassigned RNA

SEQ ID NO: 105 - RNA, 24 nt, Homo sapiens
  source 1..24: mol_type = unassigned RNA
gtaatacagtacccataataaagg

SEQ ID NO: 106 - RNA, 28 nt, Homo sapiens
  source 1..28: mol_type = unassigned RNA
gggtaatacagtacccataataaagggc

SEQ ID NO: 107 - RNA, 30 nt, Homo sapiens
  source 1..30: mol_type = unassigned RNA
ggggtaatacagtacccataataaagggct

SEQ ID NO: 108 - RNA, 24 nt, Homo sapiens
  source 1..24: mol_type = unassigned RNA
aggggtaatacagtacccataata

SEQ ID NO: 109 - RNA, 28 nt, Homo sapiens
  source 1..28: mol_type = unassigned RNA
aaaaggggtaatacagtacccataataa

SEQ ID NO: 110 - RNA, 30 nt, Homo sapiens
  source 1..30: mol_type = unassigned RNA
caaaaggggtaatacagtacccataataaa

SEQ ID NO: 111 - RNA, 24 nt, Homo sapiens
  source 1..24: mol_type = unassigned RNA
tacagtacccataataaagggctg

SEQ ID NO: 112 - RNA, 28 nt, Homo sapiens
  source 1..28: mol_type = unassigned RNA
atacagtacccataataaagggctgagg

SEQ ID NO: 113 - RNA, 30 nt, Homo sapiens; identical to SEQ ID NO: 48
  source 1..30: mol_type = unassigned RNA

SEQ ID NO: 114 - RNA, 24 nt, Homo sapiens
  source 1..24: mol_type = unassigned RNA
aggggtaatacagtacccataata

SEQ ID NO: 115 - RNA, 28 nt, Homo sapiens
  source 1..28: mol_type = unassigned RNA
aaaaggggtaatacagtacccataataa

SEQ ID NO: 116 - RNA, 30 nt, Homo sapiens; identical to SEQ ID NO: 110
  source 1..30: mol_type = unassigned RNA

SEQ ID NO: 117 - RNA, 24 nt, Homo sapiens
  source 1..24: mol_type = unassigned RNA
tacagtacccataataaagggctg

SEQ ID NO: 118 - RNA, 28 nt, Homo sapiens
  source 1..28: mol_type = unassigned RNA
atacagtacccataataaagggctgagg

SEQ ID NO: 119 - RNA, 30 nt, Homo sapiens; identical to SEQ ID NO: 48
  source 1..30: mol_type = unassigned RNA

SEQ ID NO: 120 - RNA, 24 nt, Homo sapiens
  source 1..24: mol_type = unassigned RNA
agcaagattatcctatataaaata

SEQ ID NO: 121 - RNA, 28 nt, Homo sapiens
  source 1..28: mol_type = unassigned RNA
ggagcaagattatcctatataaaataga

SEQ ID NO: 122 - RNA, 30 nt, Homo sapiens
  source 1..30: mol_type = unassigned RNA
tggagcaagattatcctatataaaatagaa

SEQ ID NO: 123 - RNA, 24 nt, Homo sapiens
  source 1..24: mol_type = unassigned RNA
agattatcctatataaaatagaaa

SEQ ID NO: 124 - RNA, 28 nt, Homo sapiens
  source 1..28: mol_type = unassigned RNA
aagattatcctatataaaatagaaatat

SEQ ID NO: 125 - RNA, 30 nt, Homo sapiens; identical to SEQ ID NO: 32
  source 1..30: mol_type = unassigned RNA

SEQ ID NO: 126 - RNA, 24 nt, Homo sapiens
  source 1..24: mol_type = unassigned RNA
ttggagcaagattatcctatataa

SEQ ID NO: 127 - RNA, 28 nt, Homo sapiens
  source 1..28: mol_type = unassigned RNA
aagttggagcaagattatcctatataaa

SEQ ID NO: 128 - RNA, 30 nt, Homo sapiens
  source 1..30: mol_type = unassigned RNA
caagttggagcaagattatcctatataaaa

SEQ ID NO: 129 - RNA, 24 nt, Homo sapiens
  source 1..24: mol_type = unassigned RNA
ttggagcaagattatcctatataa

SEQ ID NO: 130 - RNA, 28 nt, Homo sapiens
  source 1..28: mol_type = unassigned RNA
aagttggagcaagattatcctatataaa

SEQ ID NO: 131 - RNA, 30 nt, Homo sapiens; identical to SEQ ID NO: 128
  source 1..30: mol_type = unassigned RNA

SEQ ID NO: 132 - RNA, 24 nt, Homo sapiens
  source 1..24: mol_type = unassigned RNA
agattatcctatataaaatagaaa

SEQ ID NO: 133 - RNA, 28 nt, Homo sapiens
  source 1..28: mol_type = unassigned RNA
aagattatcctatataaaatagaaatat

SEQ ID NO: 134 - RNA, 30 nt, Homo sapiens; identical to SEQ ID NO: 32
  source 1..30: mol_type = unassigned RNA

SEQ ID NO: 135 - RNA, 48 nt, Homo sapiens
  source 1..48: mol_type = unassigned RNA
gtaatacagtacccataataaaggagcaagattatcctatataaaata

SEQ ID NO: 136 - RNA, 56 nt, Homo sapiens
  source 1..56: mol_type = unassigned RNA
gggtaatacagtacccataataaagggcggagcaagattatcctatataaaataga

SEQ ID NO: 137 - RNA, 60 nt, Homo sapiens
  source 1..60: mol_type = unassigned RNA
ggggtaatacagtacccataataaagggcttggagcaagattatcctatataaaatagaa

SEQ ID NO: 138 - RNA, 48 nt, Homo sapiens
  source 1..48: mol_type = unassigned RNA
aggggtaatacagtacccataataagattatcctatataaaatagaaa

SEQ ID NO: 139 - RNA, 56 nt, Homo sapiens
  source 1..56: mol_type = unassigned RNA
aaaaggggtaatacagtacccataataaaagattatcctatataaaatagaaatat

SEQ ID NO: 140 - RNA, 60 nt, Homo sapiens
  source 1..60: mol_type = unassigned RNA
caaaaggggtaatacagtacccataataaacaagattatcctatataaaatagaaatata

SEQ ID NO: 141 - RNA, 48 nt, Homo sapiens
  source 1..48: mol_type = unassigned RNA
tacagtacccataataaagggctgttggagcaagattatcctatataa

SEQ ID NO: 142 - RNA, 56 nt, Homo sapiens
  source 1..56: mol_type = unassigned RNA
atacagtacccataataaagggctgaggaagttggagcaagattatcctatataaa

SEQ ID NO: 143 - RNA, 60 nt, Homo sapiens
  source 1..60: mol_type = unassigned RNA
aatacagtacccataataaagggctgagggcaagttggagcaagattatcctatataaaa

SEQ ID NO: 144 - RNA, 48 nt, Homo sapiens
  source 1..48: mol_type = unassigned RNA
aggggtaatacagtacccataatattggagcaagattatcctatataa

SEQ ID NO: 145 - RNA, 56 nt, Homo sapiens
  source 1..56: mol_type = unassigned RNA
aaaaggggtaatacagtacccataataaaagttggagcaagattatcctatataaa

SEQ ID NO: 146 - RNA, 60 nt, Homo sapiens
  source 1..60: mol_type = unassigned RNA
caaaaggggtaatacagtacccataataaacaagttggagcaagattatcctatataaaa

SEQ ID NO: 147 - RNA, 48 nt, Homo sapiens
  source 1..48: mol_type = unassigned RNA
tacagtacccataataaagggctgagattatcctatataaaatagaaa

SEQ ID NO: 148 - RNA, 56 nt, Homo sapiens
  source 1..56: mol_type = unassigned RNA
atacagtacccataataaagggctgaggaagattatcctatataaaatagaaatat

SEQ ID NO: 149 - RNA, 60 nt, Homo sapiens
  source 1..60: mol_type = unassigned RNA
aatacagtacccataataaagggctgagggcaagattatcctatataaaatagaaatata

SEQ ID NO: 150 - RNA, 11 nt, Homo sapiens
  source 1..11: mol_type = unassigned RNA
aatttgtctag

SEQ ID NO: 151 - RNA, 11 nt, Homo sapiens
  source 1..11: mol_type = unassigned RNA
aatttttggag

SEQ ID NO: 152 - RNA, 20 nt, Homo sapiens
  source 1..20: mol_type = unassigned RNA
aaccagcgctccaccccatc

SEQ ID NO: 153 - DNA, 164 bp, Mus musculus
  source 1..164: mol_type = genomic DNA
catatcagctttctaactaataataaactatatatttctattttatataggataatcttgctccaacttggatggggtggagcggtggttcctcccctcagccctttattatgggtactgtattaccccttttgctacctttaatccttgcactgtgacttatg

SEQ ID NO: 154 - DNA, 164 bp, Homo sapiens
  source 1..164: mol_type = genomic DNA
catatcagatttctaactaataacaaactatatatttctattttgtataggataatcttgctccaacttggatggggtggagcgctggttcctcccctgagccctttattatgggtactgtattaccccttttgctacctttaatccttgcactgtgacttatg

SEQ ID NO: 155 - protein, 2009 aa, Homo sapiens
MEQTVLVPPGPDSFNFFTRESLAAIERRIAEEKAKNPKPDKKDDDENGPKPNSDLEAGKNLPFIYGDIPPEMVSEPLEDLDPYYINKKTFIVLNKGKAIFRFSATSALYILTPFNPLRKIAIKILVHSLFSMLIMCTILTNCVFMTMSNPPDWTKNVEYTFTGIYTFESLIKIIARGFCLEDFTFLRDPWNWLDFTVITFAYVTEFVDLGNVSALRTFRVLRALKTISVIPGLKTIVGALIQSVKKLSDVMILTVFCLSVFALIGLQLFMGNLRNKCIQWPPTNASLEEHSIEKNITVNYNGTLINETVFEFDWKSYIQDSRYHYFLEGFLDALLCGNSSDAGQCPEGYMCVKAGRNPNYGYTSFDTFSWAFLSLFRLMTQDFWENLYQLTLRAAGKTYMIFFVLVIFLGSFYLINLILAVVAMAYEEQNQATLEEAEQKEAEFQQMIEQLKKQQEAAQQAATATASEHSREPSAAGRLSDSSSEASKLSSKSAKERRNRRKKRKQKEQSGGEEKDEDEFQKSESEDSIRRKGFRFSIEGNRLTYEKRYSSPHQSLLSIRGSLFSPRRNSRTSLFSFRGRAKDVGSENDFADDEHSTFEDNESRRDSLFVPRRHGERRNSNLSQTSRSSRMLAVFPANGKMHSTVDCNGVVSLVGGPSVPTSPVGQLLPEVIIDKPATDDNGTTTETEMRKRRSSSFHVSMDFLEDPSQRQRAMSIASILTNTVEELEESRQKCPPCWYKFSNIFLIWDCSPYWLKVKHVVNLVVMDPFVDLAITICIVLNTLFMAMEHYPMTDHFNNVLTVGNLVFTGIFTAEMFLKIIAMDPYYYFQEGWNIFDGFIVTLSLVELGLANVEGLSVLRSFRLLRVFKLAKSWPTLNMLIKIIGNSVGALGNLTLVLAIIVFIFAVVGMQLFGKSYKDCVCKIASDCQLPRWHMNDFFHSFLIVFRVLCGEWIETMWDCMEVAGQAMCLTVFMMVMVIGNLVVLNLFLALLLSSFSADNLAATDDDNEMNNLQIAVDRMHKGVAYVKRKIYEFIQQSFIRKQKILDEIKPLDDLNNKKDSCMSNHTAEIGKDLDYLKDVNGTTSGIGTGSSVEKYIIDESDYMSFINNPSLTVTVPIAVGESDFENLNTEDFSSESDLEESKEKLNESSSSSEGSTVDIGAPVEEQPVVEPEETLEPEACFTEGCVQRFKCCQINVEEGRGKQWWNLRRTCFRIVEHNWFETFIVFMILLSSGALAFEDIYIDQRKTIKTMLEYADKVFTYIFILEMLLKWVAYGYQTYFTNAWCWLDFLIVDVSLVSLTANALGYSELGAIKSLRTLRALRPLRALSRFEGMRVVVNALLGAIPSIMNVLLVCLIFWLIFSIMGVNLFAGKFYHCINTTTGDRFDIEDVNNHTDCLKLIERNETARWKNVKVNFDNVGFGYLSLLQVATFKGWMDIMYAAVDSRNVELQPKYEESLYMYLYFVIFIIFGSFFTLNLFIGVIIDNFNQQKKKFGGQDIFMTEEQKKYYNAMKKLGSKKPQKPIPRPGNKFQGMVFDFVTRQVFDISIMILICLNMVTMMVETDDQSEYVTTILSRINLVFIVLFTGECVLKLISLRHYYFTIGWNIFDFVVVILSIVGMFLAELIEKYFVSPTLFRVIRLARIGRILRLIKGAKGIRTLLFALMMSLPALFNIGLLLFLVMFIYAIFGMSNFAYVKREVGIDDMFNFETFGNSMICLFQITTSAGWDGLLAPILNSKPPDCDPNKVNPGSSVKGDCGNPSVGIFFFVSYIIISFLVVVNMYIAVILENFSVATEESAEPLSEDDFEMFYEVWEKFDPDATQFMEFEKLSQFAAALEPPLNLPQPNKLQLIAMDLPMVSGDRIHCLDILFAFTKRVLGESGEMDALRIQMEERFMASNPSKVSYQPITTTLKRKQEEVSAVIIQRAYRRHLLKRTVKQASFTYNKNKIKGGANLLIKEDMIIDRINENSITEKTDLTMSTAACPPSYDRVTKPIVEKHEQEGKDEKAKGK

SEQ ID NO: 156-317 - skipped (162 entries)

SEQ ID NO: 318 - DNA, 500 bp, Homo sapiens
  source 1..500: mol_type = genomic DNA
tttcttttgtaatccgaaacattctagtctgcgaattaaaagccattatttgaagaaggatgccccggctccatctggccaccgaaagattgctccttaacacaggctaaggaccagcttctttgggagagaacagacgcaggggcgggagggaaaaagggagaggcagacgtcacttcctcttggcgactctggcagcagattggtcggttgagtggcagaaaggcagacggggactgggcaaggcactgtcggtgacatcacggacagggcgacttctatgtagatgaggcagcgcagaggctgctgcttcgccacttgctgcttcgccacgaagggagttcccgtgccctgggagcgggttcaggaccgctgatcggaagtgagaatcccagctgtgtgtcagggctggaaagggctcgggagtgcgcggggcaagtgaccgtgtgtgtaaagagtgaggcgtatgaggctgtgtcggggcagaggcacaacgtttc

SEQ ID NO: 319 - DNA, 500 bp, Homo sapiens
  source 1..500: mol_type = genomic DNA
gtttcttctgtaatccgaaacattctagtctgcgaattaaaagccattatttgaagaaggatgccccggctccatctggccaccgaaaggttgctccttaacacaggctaaggaccagcttttttgggagagaacagacgcaggggcgggagggaaaaagggagaggcagacgtcacttcctcttggcggctctggcagcagattggtcagttgagtggcagaaaagcagacggggactgggcaaggcactgtcggtgacatcacggacagggcgacttctatgtagatgaggcagcgcagaggctgctgcttcgccacttgctgcttcgccacgaaggagttcccctgccctgggagcgggttcaggaccgcggatcggaagagagaatcccagctgtgtgtcagggctggaaagggctcgggagtgcgcggggcaagtgaccgtgtgtgtaaagagtgaggcgtatgaggctgtgtcggggcagagcccgaagatctc

SEQ ID NO: 320 - DNA, 500 bp, Homo sapiens
  source 1..500: mol_type = genomic DNA
gtttcttttgtaatccgaaacattctagtctgcgaattaaaagccattatttgaagaaggatgccccggctccatctggccaccgaaaggttgctccttaacacaggctaaggaccagcttctttgggagagaacagacgcaggggcgggagggaaaaagggagaggcagacgtcacttccccttggcggctctggcagcagattggtcggttgagtggcagaaaggcagacggggactgggcaaggcactgtcggtgacatcacggacagggcgacttctatgtagatgaggcagcgcagaggctgctgcttcgccacttgctgcttcgccacgaaggagttcccgtgccctgggagcgggttcaggaccgcggatcggaagtgagaatcccagctgtgtgtcagggctggaaagggctcgggagtgcgcggggcaagtgaccgtgtgtgtaaagagtgaggcgtatgaggctgtgtcggggcagagcccgaagatctc

SEQ ID NO: 321 - DNA, 500 bp, Homo sapiens
  source 1..500: mol_type = genomic DNA
tctccccgcccgcgggcggcgaagtaaaggcccagcgcagcccgcgctcctgccctggagcctcgtctttctccaggaaaacgtggaccgctctccgccgacaggtctcttccacagacccctgtcgccttcgcccccggtctcttccggttctgtcttttcgctggctcgatacgaacaaggaagtcgcccccagcggagccccggctcccccaggcagaggcggccccgggggcggagtcaacggcggaggccacgccctctgtgaaagggcggggcatgcaaattcgaaatgaaagcccgggaacgccggaagaagcacgggtgtaagatttcccttttcaaaggcagagaataagaaatcagcccgagagtgtaagggcgtcaatagcgctgtggacgagacagagggaatggggcaaggagcgaggctggggctctcaccgcgacttgaatgtggatgagagtgggacggtgacggcgggcgcgaaggcgagcgc

SEQ ID NO: 322 - DNA, 500 bp, Homo sapiens
  source 1..500: mol_type = genomic DNA
ccaacaagagagaccctcatctctacaaaatattttttaaaataactgggcctcatggtgcattcctgtaatctgagctagttgggaggatagctagagcccaggagatcgaggctgcagagaaccgtgatcacacgactgcactccagcctgggtgacagagcaagaccctgtctcaatagatagatagatagatagatagatagatagatagatagatagatagataaaaacagagaggtgaaaaatatggttttaagggttctgtttaagaatactctgttccaacatggagtttgtcaactctaaagtggtaaaaaacaagacagattgtagacattttcataaaaggcaggattatttggtgtcaccaaattaaatatgttaatggtcacagcggaggccgactcaatcagccttttattctgccaggctatttgatactgctgagggcttacctatttcctgaggagaaaaatagtcattaaaatgaccttata

SEQ ID NO: 323 - DNA, 500 bp, Homo sapiens
  source 1..500: mol_type = genomic DNA
gggcatgaaagataaagttctggaggtaagtagtgatgatggttacacaacaatgtgaacatattctatgccagtgaatttacacttaaggttaaaatggtaaattttatgtatactttggcataatttaaaaaaaagtttgaaaaagaaaaaagacaaaacaataatcgtctttggagaagtctgttacactgaatctggagccaagtgaacagaaccctgattttgatcccttttctctcaaaagcccttcgcagtctctgaattaagtctattagcatgttcctcccatagtgctttgcttcatatcaacaaaaacctagctaagtgaaatcagcaacgatatgcagaaaccacctacgcaggtcacaaacatctttctatgattgtataattttcaagcaagcaataagtgaagatttttccataggccctaaactcacctttgcgaaataggaagctggtttattgggagtgatgagcagggggcgtaacaaatt

SEQ ID NO: 324 - DNA, 494 bp, Homo sapiens
  source 1..494: mol_type = genomic DNA
gagacagggcttaaaagtcctgggcaattagctgggcacagtgtcgtgcgcctgtaatcccacctagttgggaggctgaggcagaagaatctcttgaacccgaggtagaggttgcagtgagccgagatcgcgccactgcactccagcctggatgacagagtgagaccctgtctcaaaaaaaaaaaaagtcctgggcagcaaggcctccacttcaccccctaaaggttgccccaagagcaccgtgtgactgctaaggtatttccggagtctaaagacgattattcaggtctcatttgcatacccataatacactgcaaacagtatttttttcggaaaaacatttatatattgcttgacatttttaagtatgagaattttgcatgcagaatttttttgtataaactttctcaggtagtaacccttgggattagtagacaccatcagtgtactaggaattgcagttacccgaaaattgagttacagaagtaactggt

SEQ ID NO: 325 - DNA, 500 bp, Homo sapiens
  source 1..500: mol_type = genomic DNA
cgactcgcaaccttttcggggtcccgagtccaacacccgtgggaatcccatgggcaccatggcccctcgctccaaaaatgctttcgcgtcgcgcagacactgctcggtagtttcggggatcagcgtttgagtaagagcccgcgtctgaaccctccgcgccgccccggccccagtggaaagacgcgcaggcaaaacgcaccacgtgacggagcgtgaccgcgcgccgagcgcgcgccaaggtcgggcaggaagagggcctatttcccatgattccttcatatttgcatatacgatacaaggctgttagagagataattagaattaatttgactgtaaacacaaagatattagtacaaaatacgtgacgtagaaagtaataatttcttgggtagtttgcagttttaaaattatgttttaaaatggactatcatatgcttaccgtaacttgaaagtatttcgatttcttggctttatatatcttgtggaaaggacgaaacacc

SEQ ID NO: 326 - DNA, 500 bp, Homo sapiens
  source 1..500: mol_type = genomic DNA
caaagccggttatgaagcgggggtggggtgggctagttttaataggtccaggcgattagtacctggcatccttaaccacctacagtttgagaagggagtgggtgataaaagcctggaagggaagggaaatcgggccgggcattaggctccatcgctcatcaatagacaaggcctttaggaaactgcgacaacggcttttgctctgggcctttactgccgaatccaggtctccgggcttaacaacaacgaaggggctgtgactggctgctttctcaaccaatcagcaccgaactcatttgcatgggctgagaacaaatgttcgcgaactctagaaatgaatgacttaagtaagttccttagaatattatttttcctactgaaagttaccacatgcgtcgttgtttatacagtaataggaacaagaaaaaagtcacctaagctcaccctcatcaattgtggagttcctttatatcccatcttctctccaaacacatacgcag

SEQ ID NO: 327 - DNA, 500 bp, Homo sapiens
  source 1..500: mol_type = genomic DNA
cacgcctgcctgggctgctccaaggtggtggctaggggtggcacaagttacacattttcaatttggataggttgtgattcttgtcttccccagtcagatacctacagccgctgagagccggtattccaacgccatgagacgccttctgtcgtgagcagttgacaagaaagacccagcacttactgcaaccggaaggagcggttcctccctcgctcgcgcagccgctcttccccgccactccctcggtgcccgccagcacattcccagcaagccctgagtatatttgcatatcaactcactacatttttttcttctaactaaaaaatcgaaaggacaaattccagattctccttgtgaagtcttcctttcagttcagaagaaatggaattcgctcttcaacttcaggaagttgaaataaagagttgcttggattttgtgttcacctttaccaaaaaatggatttggtaacactgccaccctgctttggtgacagagaaagc

SEQ ID NO: 328 - DNA, 500 bp, Homo sapiens
  source 1..500: mol_type = genomic DNA
tcgagctccactaggccgaggaccctaaaccccgaagaaaggaaaggcctctcaccgtcctttcgccgccgccccgcgcttcctgatgagttcgtccagggagatgtccgccatcttgctccgccgagcaagccgaaagcagtcgagaccccgcgagcccgccccttcggccgctagggagcgacgaactacttccggcgtccgcggaccaactctcgcgacagccagctcaaagcaggcaagaaccggaaggggcggggacgttccccgtgagccttcgcggtgctggctgctcatctgcatacggaagttcggcacattatgaattatttattttcctcgagggaaaaaattaaatgaaaagcaacaaaatacattattaacaagtgagacaaacttcaatggaactggatcatgacctcaacagtcaactacgatagtcatcatacgcctaatgagaatagaattcattacctaggaaataaactaaaaacgtcctt

SEQ ID NO: 329 - DNA, 500 bp, Homo sapiens
  source 1..500: mol_type = genomic DNA
gacaagagaaggactgaactgggggagtgagggaagaatgcgagagtgagactcagagagtaaaggggagggaaaaaaaagaagagagaaagggcgaggaagggggcgaccgcaggagggagacagacctggagtccactcggaggcctggagccgcacaaagcgccaggtcagcggtcccggctgggtgagaccagcaggcggctctagcgcgcgggagctgggcgaggctccgggacgacctcaccaatggagactgcagtatttagcatgccccacccatctgcaaggcattctggatagtgtcaaaacagccggaaatcaagtccgtttatctcaaactttagcattttgggaataaatgatatttgctatgctggttaaattagattttagttaaatttcctgctgaagctctagtacgataagcaacttgacctaagtgtaaagttgagacttccttcaggtttatatagcttgtgcgccgcttgggtacctcg

SEQ ID NO: 330 - DNA, 500 bp, Mus musculus
  source 1..500: mol_type = genomic DNA
cacaagtaatgtacttttaaaattaacctttctataccggttttcacagtgcggctgtttttgttgttcctcttagtgttaattcacactaaagactgtgcatccgactcctacatttatgaaagtaaatgcctattgttagaacaaaaaaggctacagaacaaaaaacaaagcgaaataccatctgctttaggttcagtggtattttcccgctgacagggaggcgggtttttgggtacaggaaacgagtcactatggaggcggtactatgtagatgagaattcaggagcaaactgggaaaagcaactgcttccaaatatttgtgatttttacagtgtagttttggaaaaactcttagcctaccaattcttctaagtgttttaaaatgtgggagccagtacacatgaagttatagagtgttttaatgaggcttaaatatttaccgtaactatgaaatgctacgcatatcatgctgttcaggctccgtggccacgcaactc

SEQ ID NO: 331 - DNA, 500 bp, Mus musculus
  source 1..500: mol_type = genomic DNA
agtccttgctcttaactactgaaccaactctcccgtcctataagtaaattttcagagcactaatctattctacttcaagtttctcctgcatcagatccaggccagctggagcgagctacacggttaccccccctcctcccaaaggggaaaataaggatcaggtgaaaatgtttggaaattacaatagtagaatataaagaaagaatatgaaggcggccatgaaggggtagaaaggtagatgaccaggcgtcatccctgatgtcacgggtatgggcgtggtgtatgcagataagcgcgcagggtctgccgggtccgcgctccgtgcagaaatgtgaggggtttctcccgcggcgagggagggagcgcggatacgcgggtgtcagcagagcgcaagaatgtcgtgtgcgacgagggagacccgagatcggccagggctaagtgaccgtgtgttaagagtgtagaggcgacgggtgtgagccggggccgggcagtgggaaagc

SEQ ID NO: 332 - DNA, 500 bp, Mus musculus
  source 1..500: mol_type = genomic DNA
cggtggggctggctcctgtgctgcccgactcctgtgctccgacttggagaagacgggcgtccgttcgtccatacccaaaagagtcggccacaaggatgttggcacctgggggtgggccacgagcggccagttaggggtaagagacggtgcaaggtgacttgtccctggtccttcaccgctccagcactgcgccagtgagaaagtccaacaggccccgggatcgggcggcgaaaggaaggggcgtgatgtcactcctgggtggctgacggggcggggtgtatgcagatgagggtcgcgcaggggctgcggcgtccgcagcggccggggaaacgcgagagatttctcgcgcggcgtgggagagaacgcgggtcgccagatgtcagcggagcgccgagacggcgtgtgcgacgagggagacccgagatcgggcggggctaagtgaccgtgtgttaagagtgcaggggcggcgggtgtgagccggggccgggcgctgggagagc

SEQ ID NO: 333 - DNA, 500 bp, Mus musculus
  source 1..500: mol_type = genomic DNA
gctcctcctaggagctaacactggagccagggggatcaaagctgtgtagtgagtgtcacaaaacatcctagcactaaggagactgagacgggaacattgtagtaagttctagcctgggctacagtaagagacgtagtctcaaacaaggaaatgcgctataaataaataagatggagcttcaatggtctgtgcataactggggggttgaaggagccttccaaaggctgggttccggctccgttcagtcgttgacttgagctgggcggggcatgcaaataaggacgccgcctggtctccgcggaactctgggaacgaaaagcgcaacaaaatcctctcggcccccttggattcctcgggctttccctggcgtaaaggtggtggacaggatagaagaggagtttcggcgtcgggcgcgtgtttgcggtcgcgcgagtgttggcgaccgtgagttgaaggtgtgtgtggtgttgagtgtatggggcgtgtgggcgcagttcggt

SEQ ID NO: 334 - DNA, 501 bp, Mus musculus
  source 1..501: mol_type = genomic DNA
acagaatttactaaatagagagtgcagtcatggaattgccattttccccacgtggtttttcgtttgttcctcaccggaggcctccggtttgagcccgaagtctaaaccggtgcgcgtctgcgagctcgcgtgcgcctccgcggccggagcacagtcgcgggcgggcatcagggcggtgcgtggccgtcagtgacgcatgacccttcgcaggcagaagtgggacgggtcaagagaggactgtgatccgattggctgttcggcgaccgtatgctaatcgcggtgacagtctgcgtggtgtagggacacggtagcgactcaaaatgccccgtggacggggtctggagaggtgtcggtctgtcagagaaggtgtccccgcgagggcagacgcggtgtgagatagaggcgcggacagggatgtcacgggtcgtctgtgcgtcagtcgccgtgactaagatgtgggggcggccggtgcagtgcggcgcggtgtggagcgtgaggttt

SEQ ID NO: 335 - DNA, 500 bp, Mus musculus
  source 1..500: mol_type = genomic DNA
ttatctacgttggttttactacagaaactactgttctcagtaaaagcagagagagtacaatgccaacagctttgaaatcctctgtgctcttgtgccaatcccaccctcagaacagggagtctgtcggttatgttttcgtcctttacagttcttcgccgtctaatccattggaaacctcctttatttaaaggaaaccgtgtccaaattcagtgtacagaggtgcaaacctccgccccgctccttgtaggaagcccacgggaactgggccaatcggacggcgcttactcggctcatttacatacccataacacaccgcggctaatgcaaatattttcgtgaaaagatcttccattactcgaagttttaaaactaaaaacaaaatattatttcaaaagatcatgaagaaatttctgtcggtaacagcagtttcaattgataaatcaccatcacttatctaggaggttctgttactctagaagtgaattaagcaggacagctgt

SEQ ID NO: 336 - DNA, 500 bp, Mus musculus
  source 1..500: mol_type = genomic DNA
ggcatgtgattttgttttgtttaggtttttttttaactttatttgatcaacatgaaataatacaataagctatgtcttctaaccagcaggcagccagccaggagccatgtgtagcagtgttagaagctgcagcaggcatgtgggtaattgtggggagcttttaggaacagctagggagctgtgtggagctgcagagatgcagaggagcctggaggaacagaccagtgctgtgggctgggaggagcccccctcacaggtacttgctcaacggctccacgaccataagccttgaataagttacatggacattttacaaatggcacaggattgattatgtctgctgccagaagcctcatgtcgataaggagagagctggccaaaaggtaaagtatgctagctccatacagtgcaatagccacgtagtctcacagagaaagaggcaggcctgcatcatatccaaatatggccaagaattttattaaattaaaatgcaaacagca

SEQ ID NO: 337 - DNA, 500 bp, Mus musculus
  source 1..500: mol_type = genomic DNA
tatttttaatgaagcagggccatggagcccaagctggccttgaacttctcagcttttgtgctggtatcacagaaatgtggcgctatgcccggtcgggcctgatgttccagagtctttgcagtgtggggaacttgtaaggatgagactacaagacatcgggccacatcgcctgccactacttaagtccgattcacttcggctttagctccaagcctttaatctcgcgaagctctttttttttttttaacaacataggagctgtgattggctgttttcagccaatcagcactgactcatttgcatagcctttacaagcggtcacaaactcaagaaacgagcggttttaatagtcttttagaatattgtttatcgaaccgaataaggaactgtgctttgtgattcacatatcagtggaggggtgtggaaatggcaccttgatctcaccctcatcgaaagtggagttgatgtccttccctggctcgctacagacgcacttccgc

SEQ ID NO: 338 - DNA, 500 bp, Mus musculus
  source 1..500: mol_type = genomic DNA
gttctttgcttttacagaccgtctcctgtgtgtccctgtcagagacctgaattcggttcctagcacccatatgttagaacataacgtccaagttggaggctacaagtggcactaaattacacattatcagttttgacaggttggggcaccgtgtaaccctagtaacttagcgaaaggctcctcgaacccaacatcccacctctagctgggagcagctgttttgcaccagcgccgcctacctctccctccgcgtcggccagagcattcccagcaagcactgctctgatttgcatattgactcacggactttcctttactgctatacaaaaaacgacacaacagttctctttgtgaagagctttccctcagcccgagaagaatcgatagtttgccttttagcttcgacaatatacagttgaaagttggttagactttattttcacctttaccgtaagatgggtggaccgacaatgccactgtgcttccgaacgcgctcgagc

SEQ ID NO: 339 - DNA, 500 bp, Mus musculus
  source 1..500: mol_type = genomic DNA
gaagcagcgaggcccctacgagcctcgaggaaaagggaaagggccgctcaccgtcccttggccgccgtcccgcgcttccggatgagctcgtccagcgagagatcggccatcttgcggcgcgcagctagcggagaacggaggagaagccgactgcggcgagcccgccccgcggccggagtcaagagcggcttccggcaacccggacggccaactctcgcgacagctcaaacgaaaagctcgagacggaaggggtggagcctctctccccgtgagcctttgcggtgctcgcttctaatttgcatggaggagtccggagccttatgggctctctctcccccctcctccttttgctaatgaggaattagaattatatcgatcataaaccattaaaaagcattatcaagaggacaagtcttttagtcatacagccgatcggacactcaccatacttgtaatgagaatataatttcttacccctgaggaacgtagacacgttcctc

SEQ ID NO: 340 - DNA, 500 bp, Mus musculus
  source 1..500: mol_type = genomic DNA
cgcttcggtgtgtcacttcggccacagagggagacagacgattacggcccacggaaggccgcgtgagtctcgtgaagctggagatgcgctgggtctacctttcgccgtccgctccgccttggcagaggcgccgacacgcaccgaaggcagagaacccatctcgtatgggaccgcaccggacacgggcgcctgggccaggagcagagccgggccgtagaatagacatggccgtcgggggcggggcttcggaaggtttaaccaatccaaactgttgtattttgcatagccccaaagcattttggttaacagtaaaaacatcctaaatttaagtattttaatttaaacttagaacgaagcgagtataaaaaggattatttaaccctaaaacggattcaggatttgttataatatcaagtacagtcggctacataaggtcaccacatgtgtaaagttacaaaattctatggccttatatacctaccaagagcctgcttactctc

SEQ ID NO: 341 - DNA, 500 bp, Homo sapiens
  source 1..500: mol_type = genomic DNA
actttctggagtttcaaaaacagactgtacgccaagggtcatatctttttttgtattggtttgtgtcttggttggtgtcttaggtgttaatcctacagtggagggtttatgggaataggaagtaacatgtcgcctgcatgtcataggagaaaaagcgagcatcagccgtatcggctttgtaacacaaattagctatcgtgaagtccgctcagctcttccctttctaccctggctgctttttgcagggattggtccgtggtctccagtctcttgggttctcaccctgtgtgaaaatcttcgtgtttttccctaccccccagtcacctcttacacagcctctgcttccaagcgcagcccccacaggagtttgtaggatttctgtgctagcggggaatgtgttctcacctcatagagccaggtagaaattatgcagatgggcagttctctgggaagaaagcagggcctttggggctctcagtgtccccgttgggttgtagaca

SEQ ID NO: 342 - DNA, 500 bp, Homo sapiens
  source 1..500: mol_type = genomic DNA
actttctggagtttctaaaagtagactgtacgctaagggtcatatctttttttgttttggtttgtgtcttggttggcgtcttaaatgttaatcctacagtggagggctggcgaataggaagtaacatgtcgcctgcacgccataggagaaaaagcgagcatcagccgtatcggctttgtaacacaaattagctatcgtgaagtccgctcagctcttccctttctaccctggctgctttttgcagggattggtccgtggtctccagtctcttgggttctcaccctgtgtgaaaatcttcctgtttttccctaccccccaagtcacctcttacacagcctctgcttccaagcgcagcccccacaggagtttgtaggatttctgtgctagcggggagtgtgttctcacctcatagagccaggtagaaactacgcagatgggtgctgttctccaggaagaaagcagggcctttggggctctcagtgtccccgttgggttgtaga

SEQ ID NO: 343 - DNA, 500 bp, Homo sapiens
  source 1..500: mol_type = genomic DNA
actttctggagtttcaaaaacagaccgtacgccaagggtcatgtcttttttcgtattggtttgtgtcttagttgttaatcctacagtggaggcctggggaataagaagtaacatgtggcctgcacgccataggagaaaaagcgagcatcagccgtatcggctttgtaacacaaattagctatcgtgaagtccgctcagctcttccatttctaccctggctgctttttgcagggattggtccgtggtctccagtctcttgggttctcaccctgtgtgaaaatcttcgtgtttttccctaccccccaagtcacctcttacacagcctctgcttccaagcgcagcccccacaggagtttgtaggatttctgtgctagcggggagtgtgttctcacctcatagagccaggtagaaattatgcagatgggcgctgttctctgggaagaaagcagggcctttggggctctcagtgtccccgttgggttgtagacataacactctta

SEQ ID NO: 344 - DNA, 304 bp, Homo sapiens
  source 1..304: mol_type = genomic DNA
cctccggggatacaacgtgtttcctaaaagtagagggaggtaagagacggtagcacctgcggggcggcttgcacgccgagtgcctgtgacgcgccggcttaacttaactgcttccctgaagtaccttgaggttcctgatgtgcgggcggtagacggtaggcttatgcggcacgctgtcgtttccaccgtggctactgcgctttgggaaggccacgacctcctcctttggggaggtccttaggatctcagcttggcagtcgagtgggtggcgaccttttaaaggaatgggacccacccggagttc

SEQ ID NO: 345 - DNA, 492 bp, Homo sapiens
  source 1..492: mol_type = genomic DNA
ttcccttcttgtaatacaaaataataacaaccacagaggacatcgcaagtaaaatgtgtataacaaccccatctaaagaaccctatcatctttctactatctgtctacctaaatatgtatagtataaataaccctatatagcactctaagcaacttaagttaggtaacttagaaaactcttttttttttttgagactgagtctcactctgtcgcacccaggctggagtgcagtggcgtgatctcggctcactgcaacctccaccttctgggttcaagtgattctcccatctcagtctcccaagtagctgggattacaggcacgccaccatgccctgctacatttttttttttttagtagagatgaggtttcaccacattggccaggctgttctcgaactcctgacctcaggtgatccgcccaccttggcctcatgaagtgctgggattacaggtgtgagccactgtacccagccagaaaactcttaaaaaac

SEQ ID NO: 346 - DNA, 382 bp, Homo sapiens
  source 1..382: mol_type = genomic DNA
ctgaattttcttgcagttgaacaacagaggctttttttgtgtgtgtgggggtgcttggttttgggaggttgaagagtacttgttcgcaaactctctaaatgagagatggggaagtgtcttaccagctgattcgcgagagcacctgcaagtttacctgttttagtgatttgcgtttatgaaagttggagttgctgattttgtgatctctacttttaaggtaaaagcagggcggtgttgacttttcttgccagttggctgtcctgttttctttctcgcactgttttctttttgagacgaagtctgtcgctcaggctggagtgcactggcgtgatctcggctcgctgcaaactttgccgaacccctgtttagcgatttccgtttg

SEQ ID NO: 347 - DNA, 500 bp, Homo sapiens
  source 1..500: mol_type = genomic DNA
atatgtggtaatccaacaatagaaattatttttaagtttgtgtgttcctttttctgttcaatggtgcttttgatattgttgtaaagcagtgactagcagattctgtgtggtaaaagcactgaaccctgtttagttcttttctccctaccttattggtaattatttctgtgtatatatgttccaaagaaatgcggcttgtatattcatgcttttcaactttttgtgatagacagttgatacacaagtagtacctcctccgggatcttcttagtcaagactgtttggtagatgcatgttttttgttacttgtaatgtacagtattcagttcattttctttttgcagcactgtccggttgaaacacaacgcgaggatcgggcgtggtggctcacgcctgtaatcccagcactttgggaggccgaggcaggacaatcaagaccaatcctggtcatcaaggcaggagaatcaagaccatcgaggtcaggagatcaagaccatcct

SEQ ID NO: 348 - DNA, 498 bp, Homo sapiens
  source 1..498: mol_type = genomic DNA
acatcaggttgtttttctgtttttacatcaggttgtttttctgtttggttttttttttacaccacgtttatacgccggtgcacggtttaccactgaaaacacctttcatctacaggtgatatcttttaacacaaataaaatgtagtagtcctaggagacggaatagaaggaggtggggcctaggcagattcatctctgcggtgcattttgcctctggccctcgggccctagtttgcgatctttcccatcttgcctctgcttccctctgcacaatcctgagtattgcagtaccttacacttaaggaaatttcgtcttgccaaagttgatccatttcagctccgaaacataacaggaactagtgcaacgataaacgtatgaggaacttgcaataagagtgacagaatcctttgaatcaaaaaaaaaaaaagccaccacttaatgagtatctaccatatgtcaagggcttcaccaatatttcattgaaatattccagacca

SEQ ID NO: 349 - DNA, 500 bp, Homo sapiens
  source 1..500: mol_type = genomic DNA
cttatgatgtttgttgccaatgatagattgttttcactgtgcaaaaattatgggtagttttggtggtcttgatgcagttgtaagcttggggtatgaaggtttgggccacgcctgggcgcttccggctgcgccggatgctgtttcctttccgctcccaggggcgttgggaacggttgtaggacgtggctctttattcgtgagttttccatttacctccgctgaacctagagcttcagacgccctatggcgtccgcctcgacccaaccggcggccttgagcgctgagcaagcaaagggtgagaatcgtcctagtcaaggcataggctgctggcctggggtagtcaaggcatgggctgctggtctggggaggatgcgggcggaggatgtggggcgacaaacctggctacgtccgccgggaaaatggggtaggggacgccgggtaccgtccttctaagtggggcgcttgcccccaagacttgggatcttattgggttacctaca

SEQ ID NO: 350 - DNA, 498 bp, Homo sapiens
  source 1..498: mol_type = genomic DNA
tctttactgttatatgttaggcgaaatattacgcgtttggagtaagtggtgctttttgtaactgaaaagagattctgtgtgtgtttttttttttttagaggctgcatagttatttgtatgaaccgcaggtgacctaattagcaaggtaattcagacctgtatcctagcacttaagaagtggaagtgggataaccctgcgtgttctcgtgtgggaggctagcttaagcaacaaagcaggaaggccccaccaacaaaagaatttaaaaattatacgtgcgtggtggcgcgcgtatgaggaaattatttggcaactgtgttacagtatagcagcaaatggaatagacctagtccctgactttaggagacctgcctcagccccccgaatggctgggactacaggcgtgcgcctccgcgcccagctaatttttgcatttttggtagagacgggttcaccatgttggccaggatggtctccatctcttcatctggtgatccgcc

SEQ ID NO: 351 - DNA, 500 bp, Homo sapiens
  source 1..500: mol_type = genomic DNA
accttattcacgcctaaaaagtagactgactgtggggtggtcgtgttttttgtttcttgttggtaggtggtgaatgcgtttttttcgttgttttctccgttactcaggctgccagttgcttggcagtcttgtcgctggctgtggacgctctgcacttcatcaccgtccccagctgcgctttgagccggtctaaggttgcccacagtattgacgttgggacccacgaaactggcaatttccatgtgtgcggccttacccagttctcccaaacttctgcgtataaccgcttctctgtgcttcagaaagataagtccggccccggcctcacacagcagctcagttcgtgacagcgtttaatatgtaaaatggagcaaataatttatagggcgttgggagagttaaagagactaattcatttacgtgttaaatacagggaatggcttttgcattgatataaccccagcctccagcatgcgccagacctgacgtaggtgttcggc

SEQ ID NO: 352 - DNA, 500 bp, Homo sapiens
  source 1..500: mol_type = genomic DNA
tttgacccattacccatctaagttagatgcttttttaaatgttttttaatttttaaatttttaatttttttcattatttattttttatttttgagacggatctcggctcactgtaacctccacctcccgggttcaagcgattctcctgactcagcctcccgagtagctgggattacaggcgcgcgccaccatgcccggctaatttttctatttttagtaaagacggggtttcgccatgttgaccagggtggtcttgaactcctgacgtcaggtgatcctcctgcctcgtgctgggattgcaggcgtgagccaccgctcccggcccttagatgctttttaatcagcaagtacgcaatgctttcctgacaggaatgtcaagtccgtcaggaaatccacataagggtgttaagcaggcaaagtaccacatacagattaaaatcaaaagcactgtcaacgcttatttaatttatacagtagaccctaacttttctaattttgtg

SEQ ID NO: 353 - DNA, 500 bp, Mus musculus
  source 1..500: mol_type = genomic DNA
gtttacttggttttaaaaatagcttgcactagcgataccgcgaatatggttattaggtttgttaggcacagtcgtgtcttactatagaaaaataacgtagtgttcattttgctgcctgtatgtgttaatttgtccttattgcgccattgttcttgttaagtcttctgtaaggagttgcgggtttcaaactgtcagtctgagagcataagctcacttttcagtcagttgaattgaatgttacattcgattggttctggatattgatattacccaaggcttgtcctgtttgtaagtcttttcctacacctgacaatatgattatgtttacaatgtccctagaactctgggtgtatcgttcccactgaataaaatttgatctctaagttgacctataaatttaagtaccaaaaaactggtttgtaagattttggaaggcagaggcagggaagagaccaacgtggtctacatataaagtaccaggtacatataaagtaccaggt

SEQ ID NO: 354 - DNA, 496 bp, Mus musculus
  source 1..496: mol_type = genomic DNA
atttttgtggtgctaaaagttagattgcattccgcccttctcacgtctctttacgtgttgtttgcgaggcgtggcctcggaggtaaatggtctccttttacctcagataagcttacctttgctctgtgagtaagaatgtagctacacttccaaatttagctattgtcctttgcggtccaaatgaaaatattaccttccgatctaacaatgttaaactagtcccaggcccttctatcgattgccagaatagactagactactacacagacacaccctctcaaatcaggccagctcctgcaacctgcacctacagtttgtcccctgggacaaatgaaaggacaggccctctttcccccccccccccaaatcagagcacacacagatcttggggtctggggcagaaatttcgttcatggaaaaaacaaacaaacaaacaaacacgatcaaaggaagctcgttccctttggcctcagggtttcttagacgccgtgttccc

SEQ ID NO: 355 - DNA, 497 bp, Mus musculus
  source 1..497: mol_type = genomic DNA
ataactggtaaccaaaagcagattactttcccccttgtggtcttcgcgtttgcggacgggagagaactttcggccattttccttttagaaatttaacttcttgaaggccaccaggtgacccttacttccctctcacctttccttctacctgtactttctctattaaaaagcctgcagaagtacccttgacaaattgccaaaaatgacacctaaaaaaaaaaaaaggaaaaacgacaccttaggtaattataggttgtaagaaaaagatttgacctcttggagtttttatttcttaataccaaaggacacccaaggaacgtatctctcaaaattgggtttcaaacctcagccgtttccttcttagttccagtgcttaacacgcaacagacctgcacaccactacactgcatacgagttttaaagttaataaatcagtcacccctccatagtcttctacctacttgaagacagaaacggctgctaggaagcaattcttc

SEQ ID NO: 356 - DNA, 500 bp, Mus musculus
  source 1..500: mol_type = genomic DNA
ctggggaataagagtggtttaaagaaagaacaatttgagagatctgcttagatctaataaaacccaagtatagtttctttagacgtcttatatctcacgtaggacctcttatttcagactcactgcaagaacaagctaaagaactatatacagtcaggaacaaggtgagccatcgcggttctcagtcccatgatcttaagagtttttcctcttcccctcttccctggctgtcctggagctcactctgtagaccaggctggtctcaaactcagaaatccacttacctctgcctcccaagggctgggattaaaggcatgcaccaccattgcccggcagggtatgtggactatgctgtccttcaactcagagatcgtggtactttaaatctcattttccgaaagaaaagaaaagaaaggaaggggggaaataaagccagtatattttgcacccacaatctgaagttctacaaatattgttagaaaatgcaaaggacccaagtc

SEQ ID NO: 357 - DNA, 500 bp, Mus musculus
  source 1..500: mol_type = genomic DNA
ctcggtttatcttaaagggttttaaatatagaaagcttccttagtcttatgggtgagagtgctgtttaagccttacctaggtatgtctttgaacatttattacagattgttatttgtgactatgaccactcaggtgttctgttcttgtgaatttagacacactcagaaaggctacacactcaaagaccacaccaaagtgaagtactatctgggccgtgaaactggtcacatatcagttattttgcagtaaaacaaggaagtcaatcatactgcttcagtgggtcagggagtcaagaatgcacagtacaagagctggtgagattcctcagcaggtaagagcactgaatgctcttccaaagattctgagttcaaatcccagcaaccacgtggtggatttgaacaaaggatgaaaacaaccatccataaccagatctgatgccctcttctggagtgtcaaaagacagctatggtgtacttacataaataaataagtaaaaaca

SEQ ID NO: 358 - DNA, 500 bp, Mus musculus
  source 1..500: mol_type = genomic DNA
ccacattttgtgtttaaaaatagaaatatttaagtgagatcagtttaaatctgctttatctagggtgtctaactgcttgcatctttttaacttttccttatttgtgagaaggtctgtaaaacttattatatgttagtacactgtagctgtcttcagacactccagaagagggattcagatcaccttacagatggttttgagccaccatgtggttgctgggatttgaactcaggacctttagaaaagtagttgggtgctcttacccgctgagccatctcaccagccctttttttttcttttttccagttcgggtttctctgtgtgtagccctggctgtcctggaactcattctgtagaccgggctggcctcgaactcagaaatctgcctgcctctgcctcccaagtgctgggattaaaggaatgtgccttcattgcccggctctagggctttttgttgttgtttgtttgtttgtttgtttgtttgcttttgtggatggcct

SEQ ID NO: 359 - DNA, 500 bp, Mus musculus
  source 1..500: mol_type = genomic DNA
aaaaccagtaagggagaaaggtcaagtaacatataaaggaaggcctatcagaattacaccagacttttcaccagagactatgaaagccagaagagcctggacagatgttatacagacactaagagaacacaaatgccagcccaggctactatacctggccaaactctcaattaccatagatggagaaaccaaagtattccacgacaaaaacaaattcacacaatatctttccacgaatccagcccttcaaaggataatgacagaaaagaagcaatacaaggacggaaatcacgccctagaacaaccaagaaactaatcattcaacaaaccaaaaagaagacagccacaagaacagaatgccaactctaacaacaaaaataaaaggaagcaacaattacttttccttaatatctcttaatatcaatggactcaattccccaataaaaagacatagactaacagactggctacacaaacaggacccaacattctgctgctta

SEQ ID NO: 360 - DNA, 500 bp, Mus musculus
  source 1..500: mol_type = genomic DNA
cccaatttcactggtctacaatgaaagcaaaacagttctcttccccgctccccggtgtgtgagaggggctttgatccttctctggtttcctaggaaacgcgtatgtgctagagccacgctctgagacttccgcctcgtgcggtcccgcttcctttctgcctcctctggcctgcatccgtgggggaggtggctggctgcagggttctccggatctcttctgtgttcccactactcaagcaccgagtggcgttctatggcgtccgcctcggctcagcccgcggccctgagcgcggagcaggccaagggtgaggaaagagcctagtctgggtgtgggccgtcttctggggggagggcgcgatactattctttgcctctccaagtggggcccttgcccattagggcgaagggttgggaggacaagcttatcgggttgcttgcaggcctcggcccactaattccctgcctcttccctcctctgggctcgcccgccgtcctccgcg

SEQ ID NO: 361 - DNA, 500 bp, Mus musculus
  source 1..500: mol_type = genomic DNA
gaatttgttaaattacaggaggaagcttttttagttcattttacaaatactttcttgttaggtagataataccttctaaggttattatctggatcttctaagtctttttatcgctagcaagtctaagtttctggactttggaattagaagttaatgtcgtaggcgggcatggtggtccacgcctttaatcccagagtttgggaggcagacgcaggtggttttctgagttcgaggccatcctgctcttcaatgttagttccaggacagccagggttatacaaagaaaccctgtctcgagaaacaaaacaaacaaaaaaagagtagctgagtgctctgagttgtctctccagccccttagctatttattttcatttaaattatttttgttttattcgcttgtgtgcctgagtttgaatttcccgggattaacagttgaagactagggctggtgagatggctcagcggttaagattgccgactgctcttccaaaggtcctgag

SEQ ID NO: 362 - DNA, 500 bp, Mus musculus
  source 1..500: mol_type = genomic DNA
accccctaattctacaagaatagaaagcttagcagctcctctgaatggttgctctcaggtgctagtggttgcaagtcgtatgttgatgcctgcctttgccctacctggtgtgtgagcgtgagcgcgccccacctctccagcctctctcttactgtttttcagacaagatgggactgttgttctcctactgctatgtacctcaatttcaattgatcatgcctggacataactgcccatgttgtaaggtcgtctacgttgtaaggtcgtgctcagtttctgatgcctagactagtcacctttccgtttgcctcctgactgtgtaaatgaggcaaatgaaggtggtctcttaactgacatgttagtgtttgacctatgggatagtttctcattgttgagacagaatttctagaagctggtccgctgagcggctaagagcacttgctgatattgcaaaggatctacctgggtttggttctcagcactcacatggaagttcacat

SEQ ID NO: 363 - DNA, 67 bp, Mus musculus
  source 1..67: mol_type = genomic DNA
tgtagttcctgcaatttaattttcgtttaaaactttattttattctttaacttaaaaaaaatatata

SEQ ID NO: 364 - DNA, 6383 bp, unidentified
  source 1..6383: mol_type = other DNA
ggcctccgcgccgggttttggcgcctcccgcgggcgcccccctcctcacggcgagcgctgccacgtcagacgaagggcgcagcgagcgtcctgatccttccgcccggacgctcaggacagcggcccgctgctcataagactcggccttagaaccccagtatcagcagaaggacattttaggacgggacttgggtgactctagggcactggttttctttccagagagcggaacaggcgaggaaaagtagtcccttctcggcgattctgcggagggatctccgtggggcggtgaacgccgatgattatataaggacgcgccgggtgtggcacagctagttccgtcgcagccgggatttgggtcgcggttcttgtttgtggatcgctgtgatcgtcacttggtcggtaagtttagtctttttgtcttttatttcaggtcccggatccggtggtggtgcaaatcaaagaactgctcctcagtggatgttgcctttacttctagggtacgccaccatgggcacaactactgaaacagaaataagaaagagacggtccagttcttatcatgtttccatggatttattggaagatcctacatcaaggcaaagagcaatgagtatagccagtattttgaccaacaccatggaaggtatgttaaaagtcctgcgtcacagttacttggtgctttggtaatgatgaaaaaacacttcataaatttcaataaaatacttcctgacttgatattgtatcattattacacattttactaaataacagtaaaatccgtgcataactcatggattctattatcttccacagattttttttttttatatttagcctccagaaagctgctgcaaatgtaaggtatattttgaacaccactttcatacattaaattctaaacattgaaacttgtgtgcatgacgttgaaaagagtgtaatgataaatgcttatacttatgatgatgctaagccatttggattatattaactgcttgagacacaagttataaaatcctatgacttaaccagaaatataaattaaaaatgtgaattagggtttgatattaacttccttgaagcaaagtgtttaaaattttgtagtcctacttttgcctttctctgaccagattcttacaatatatcagctttctctttagttgcagattttatctgaatagttaacataatgtgtagcagtctggatctcagaatgccaaaataaagactttggggacagcttaatctgtgatcaatttctggctctgccatatgttaaatgtgttaatttgtgactttgaatttcagtctcctcatcagtaaaatgtggatgatgatgtttaggcataaggttgttgaatggattaaataagccttcttagataaaacactgatgtatttggcatgcagaagacagttaataaatattatcaatattagttgttttgttgttgttatttttgttaattcacatgtttttgcctttccatactgtaagtgaattcaaacaactgtcaacttcaactacttggaaaatattttcatgtaaaatgtattctatcccccttccttgccctcctattccctcctctccctatctctttacaaaccttctcccttgtaccccttcccaggtatgtgtgtgagtgtgagtgtgtgtagatgtgtcaagggagaagagaaaaggagaatgaaagcaaaagagagcaagcatacacgtccctttcttattgataattagattttctcttgagattggatagattcctggaataattcttttcctgtctgtatgcaaagatcccataatattattaataccaatacgaaaagcctgaaaatcacagccagaaaaaattcacagtgtagacgactgtgtacatcacagacaagtcagtattacaaaacccaattttcatagtgtcctatttcagtatcctaatgcaattcactgatttcaattgaatattaaactctagtacgttcttccccaacctcgcctgcgttagcttgcactccctcttccccccagctgccagtagcttgctcctccctgtccctccaggtaaatcttttgaagattgtctggccttccgctccttgccatagcaaaaccactgagaggaagctgccagtggttctgctaccgatgtcagcagcatgtctgctccctaaagcaggaagtagagaaggagacagggtaagtctaaatcaacagtcatgctttgcacttctgatagcattaagtttgagctaaataagacattacttaaaaaacctcaaatatccacaagattggacttgccaactaattaagatttggagttcaaaataaatgcacccacacctttctccatggaactatgtgacatggggttgcttaggatggaaaggatgttctaggaataagtgcaatctaggaagctgaagactgagagtgttttcgttttattatctgcagagcttttgacttgtgtatttgtgagaaataatggccaagtttttattctgtttttaatcagttatctagaatgaaaactgacttttctttattcaattgtatgtagacacattgagtgtgacatttgtcaaggttggttgttagcaatatcacatacatgcatactcaagcagacttaagatagtcctttttttttttttttttttttttggtttctgataatggtgcaaagttttcctggttgacataatctcttttcttggggatcctttcttctatgtctgattattgtttatttcacctttcctttttatgaaccaggcttgttgatccggttggcaatttttgttctccttctttttaactacagccaagtctccgttgtccagggtaatggatagcctcatgcttaatgaagcagtagtggataagcaaaaatgaaccatttgcgtttcaaatttttaaaagtgcaaaatcacatagaaatgttttctggtcacacctttgtgaaggatggtgggagggtgagttagaagcgcctgaagaatcaaggtgagccagcaaaagacacagatttactgtaagtgattctatgtggataacccatgcaggaataatggagatgtggctgcagttctctcctgaatgctttgctttgttttaaagtgtgagattccccccttttttttggaatgaataattgaatgattttattttagaacttaaacaactttgctccggttaagttgatgaagagattatcttgccaaaggaagatggtagacagtttttcacttcctaattccccaaatttctttgccaatattcaccaaatttcagtattttgggtgtgaccttaaagatctgtgcatttctgtcttctctcccaatgtttggttgaaattcttcttgacatcattgtacattttccttgaataaatgcattttaatataaaattttatgtcatgtttgatatgagagttatatatttaaatacatttaaataaatgtttaccatgaaaatgtatgaattatatgtatgtttcacctaaaatcctttgtatttttccagtaataaatgagttccactttgtgaaatgttgatttgtaacaacagtgaggactccagttccttaggctggggtattttctcttcttttatgccctctagttaaatgagaaatgtagagagatggaactttgttgtgtctaatatgcaagcctataatctaataaaatttaatttgagacttttaaactgagattggtgacactgacaaaattatctaattagaagatcaccaaaacatatctaatccaagaaactgacattcagtgtgactgattaaggttcttaggacatctcctgagatatctctgataacatatatacttcttgctctacctggaacatggatgagctttaagtgtatgcaatgcaagttctacccattagtttctagcagccttgaagataagtatcagacagtttagtgttgccaatagaatcttggaagctatgtttagccaggatacatttggaaagcttactagcctttctgtactgatcctttctatgacagcaaacccattgtaaaattttccctgttcctccagcagattaacccataatatcttttaacaactttagattttttaaattccttttaatttaaaccaaatctgcttaatagaaagtaagcagttttcatgaggattctaactttttttcttccagaacttgaagaatccagacagaaatgcccaccatgctggtataaatttgctaatatgtgtttgatttgggactgttgtaaaccatggttaaaggtgaaacaccttgtcaacctggttgtaatggacccatttgttgacctggccatcaccatctgcattgtcttaaatacactcttcatggctatggagcactatcccatgacggagcagttcagcagtgtactgtctgttggaaacctgcttggcagcggcgagggcagaggcagtctgctgacatgcggtgacgtggaagagaatcccggccctcttaagcaaaggaaatctggccgctctgctgggaagtatgatgtgtatttgatctccgggatggaagacgccaaaaacataaagaaaggcccggcgccattctatccgctggaagatggaaccgctggagagcaactgcataaggctatgaagagatacgccctggttcctggaacaattgcttttacagatgcacatatcgaggtggacatcacttacgctgagtacttcgaaatgtccgttcggttggcagaagctatgaaacgatatgggctgaatacaaatcacagaatcgtcgtatgcagtgaaaactctcttcaattctttatgccggtgttgggcgcgttatttatcggagttgcagttgcgcccgcgaacgacatttataatgaacgtgaattgctcaacagtatgggcatttcgcagcctaccgtggtgttcgtttccaaaaaggggttgcaaaaaattttgaacgtgcaaaaaaagctcccaatcatccaaaaaattattatcatggattctaaaacggattaccagggatttcagtcgatgtacacgttcgtcacatctcatctacctcccggttttaatgaatacgattttgtgccagagtccttcgatagggacaagacaattgcactgatcatgaactcctctggatctactggtctgcctaaaggtgtcgctctgcctcatagaactgcctgcgtgagattctcgcatgccagagatcctatttttggcaatcaaatcattccggatactgcgattttaagtgttgttccattccatcacggttttggaatgtttactacactcggatatttgatatgtggatttcgagtcgtcttaatgtatagatttgaagaagagctgtttctgaggagccttcaggattacaagattcaaagtgcgctgctggtgccaaccctattctccttcttcgccaaaagcactctgattgacaaatacgatttatctaatttacacgaaattgcttctggtggcgctcccctctctaaggaagtcggggaagcggttgccaagaggttccatctgccaggtatcaggcaaggatatgggctcactgagactacatcagctattctgattacacccgagggggatgataaaccgggcgcggtcggtaaagttgttccattttttgaagcgaaggttgtggatctggataccgggaaaacgctgggcgttaatcaaagaggcgaactgtgtgtgagaggtcctatgattatgtccggttatgtaaacaatccggaagcgaccaacgccttgattgacaaggatggatggctacattctggagacatagcttactgggacgaagacgaacacttcttcatcgttgaccgcctgaagtctctgattaagtacaaaggctatcaggtggctcccgctgaattggaatccatcttgctccaacaccccaacatcttcgacgcaggtgtcgcaggtcttcccgacgatgacgccggtgaacttcccgccgccgttgttgttttggagcacggaaagacgatgacggaaaaagagatcgtggattacgtcgccagtcaagtaacaaccgcgaaaaagttgcgcggaggagttgtgtttgtggacgaagtaccgaaaggtcttaccggaaaactcgacgcaagaaaaatcagagagatcctcataaaggccaagaagggcggaaagatcgccgtgtaattctagagtcggggcggccggaattcagatctaccagacatgataagatacattgatgagtttggacaaaccacaactagaatgcagtgaaaaaaatgctttatttgtgaaatttgtgatgctattgctttatttgtaaccattataagctgcaataaacaagtt

SEQ ID NO: 365 - DNA, 533 bp, synthetic construct
  source 1..533: mol_type = other DNA
taaagactgtgcatccgactcctacatttatgaaagtaaatgcctattgttagaacaaaaaaggctacagaacaaaaaacaaagcgaaataccatctgctttaggttcagtggtattttcccgctgacagggaggcgggtttttgggtacaggaaacgagtcactatggaggcggtactatgtagatgagaattcaggagcaaactgggaaaagcaactgcttccaaatatttgtgatttttacagtgtagttttggaaaaactcttagcctaccaattcttctaagtgttttaaaatgtgggagccagtacacatgaagttatagagtgttttaatgaggcttaaatatttaccgtaactatgaaatgctacgcatatcatgctgttcaggctccgtggccacgcaactcaatgatagggacttagggtgagaaatattcctctaacattctacaaatttttggagcaggttttctgacttcggtcggaaaacccctactttctggagtttcaaaagtagactgtacgctaa

SEQ ID NO: 366 - DNA, 559 bp, synthetic construct
  source 1..559: mol_type = other DNA
taaagactgtgcatccgactcctacatttatgaaagtaaatgcctattgttagaacaaaaaaggctacagaacaaaaaacaaagcgaaataccatctgctttaggttcagtggtattttcccgctgacagggaggcgggtttttgggtacaggaaacgagtcactatggaggcggtactatgtagatgagaattcaggagcaaactgggaaaagcaactgcttccaaatatttgtgatttttacagtgtagttttggaaaaactcttagcctaccaattcttctaagtgttttaaaatgtgggagccagtacacatgaagttatagagtgttttaatgaggcttaaatatttaccgtaactatgaaatgctacgcatatcatgctgttcaggctccgtggccacgcaactcaatgatagggacttagggtgagataatggtcacaggcggaagggatcgaatcagagtcatgcggaggtgtaaatttttggagcaggttttctgacttcggtcggaaaacccctactttctggagtttcaaaagtagactgtacgctaa

SEQ ID NO: 367 - DNA, 539 bp, synthetic construct
  source 1..539: mol_type = other DNA
taaagactgtgcatccgactcctacatttatgaaagtaaatgcctattgttagaacaaaaaaggctacagaacaaaaaacaaagcgaaataccatctgctttaggttcagtggtattttcccgctgacagggaggcgggtttttgggtacaggaaacgagtcactatggaggcggtactatgtagatgagaattcaggagcaaactgggaaaagcaactgcttccaaatatttgtgatttttacagtgtagttttggaaaaactcttagcctaccaattcttctaagtgttttaaaatgtgggagccagtacacatgaagttatagagtgttttaatgaggcttaaatatttaccgtaactatgaaatgctacgcatatcatgctgttcaggctccgtggccacgcaactcaatgatagggacttagggtgaacattactttgaacttaacactactagaagaatttttggagcaggttttctgacttcggtcggaaaacccctactttctggagtttcaaaagtagactgtacgctaa

SEQ ID NO: 368 - DNA, 533 bp, synthetic construct
  source 1..533: mol_type = other DNA
taaagactgtgcatccgactcctacatttatgaaagtaaatgcctattgttagaacaaaaaaggctacagaacaaaaaacaaagcgaaataccatctgctttaggttcagtggtattttcccgctgacagggaggcgggtttttgggtacaggaaacgagtcactatggaggcggtactatgtagatgagaattcaggagcaaactgggaaaagcaactgcttccaaatatttgtgatttttacagtgtagttttggaaaaactcttagcctaccaattcttctaagtgttttaaaatgtgggagccagtacacatgaagttatagagtgttttaatgaggcttaaatatttaccgtaactatgaaatgctacgcatatcatgctgttcaggctccgtggccacgcaactcaatgatagggacttagggtgatagaagtgcaaagcatgactgtcaaatttttggagcaggttttctgacttcggtcggaaaacccctactttctggagtttcaaaagtagactgtacgctaa

SEQ ID NO: 369 - DNA, 1087 bp, synthetic construct
  source 1..1087: mol_type = other DNA
tttcttttgtaatccgaaacattctagtctgcgaattaaaagccattatttgaagaaggatgccccggctccatctggccaccgaaagattgctccttaacacaggctaaggaccagcttctttgggagagaacagacgcaggggcgggagggaaaaagggagaggcagacgtcacttcctcttggcgactctggcagcagattggtcggttgagtggcagaaaggcagacggggactgggcaaggcactgtcggtgacatcacggacagggcgacttctatgtagatgaggcagcgcagaggctgctgcttcgccacttgctgcttcgccacgaagggagttcccgtgccctgggagcgggttcaggaccgctgatcggaagtgagaatcccagctgtgtgtcagggctggaaagggctcgggagtgcgcggggcaagtgaccgtgtgtgtaaagagtgaggcgtatgaggctgtgtcggggcagaggcacaacgtttcaatgatagggacttagggtgatagaagtgcaaagcatgactgtcaaatttttggagcaggttttctgacttcggtcggaaaacccctactttctggagtttcaaaaacagactgtacgccaagggtcatatctttttttgtattggtttgtgtcttggttggtgtcttaggtgttaatcctacagtggagggtttatgggaataggaagtaacatgtcgcctgcatgtcataggagaaaaagcgagcatcagccgtatcggctttgtaacacaaattagctatcgtgaagtccgctcagctcttccctttctaccctggctgctttttgcagggattggtccgtggtctccagtctcttgggttctcaccctgtgtgaaaatcttcgtgtttttccctaccccccagtcacctcttacacagcctctgcttccaagcgcagcccccacaggagtttgtaggatttctgtgctagcggggaatgtgttctcacctcatagagccaggtagaaattatgcagatgggcagttctctgggaagaaagcagggcctttggggctctcagtgtccccgttgggttgtagaca

SEQ ID NO: 370 - DNA, 1087 bp, synthetic construct
  source 1..1087: mol_type = other DNA
tttcttttgtaatccgaaacattctagtctgcgaattaaaagccattatttgaagaaggatgccccggctccatctggccaccgaaagattgctccttaacacaggctaaggaccagcttctttgggagagaacagacgcaggggcgggagggaaaaagggagaggcagacgtcacttcctcttggcgactctggcagcagattggtcggttgagtggcagaaaggcagacggggactgggcaaggcactgtcggtgacatcacggacagggcgacttctatgtagatgaggcagcgcagaggctgctgcttcgccacttgctgcttcgccacgaagggagttcccgtgccctgggagcgggttcaggaccgctgatcggaagtgagaatcccagctgtgtgtcagggctggaaagggctcgggagtgcgcggggcaagtgaccgtgtgtgtaaagagtgaggcgtatgaggctgtgtcggggcagaggcacaacgtttcaatgatagggacttagggtgatagaagtgcaaagcatgactgtcaaatttttggagcaggttttctgacttcggtcggaaaacccctactttctggagtttctaaaagtagactgtacgctaagggtcatatctttttttgttttggtttgtgtcttggttggcgtcttaaatgttaatcctacagtggagggctggcgaataggaagtaacatgtcgcctgcacgccataggagaaaaagcgagcatcagccgtatcggctttgtaacacaaattagctatcgtgaagtccgctcagctcttccctttctaccctggctgctttttgcagggattggtccgtggtctccagtctcttgggttctcaccctgtgtgaaaatcttcctgtttttccctaccccccaagtcacctcttacacagcctctgcttccaagcgcagcccccacaggagtttgtaggatttctgtgctagcggggagtgtgttctcacctcatagagccaggtagaaactacgcagatgggtgctgttctccaggaagaaagcagggcctttggggctctcagtgtccccgttgggttgtaga

SEQ ID NO: 371 - DNA, 1087 bp, synthetic construct
  source 1..1087: mol_type = other DNA
tttcttttgtaatccgaaacattctagtctgcgaattaaaagccattatttgaagaaggatgccccggctccatctggccaccgaaagattgctccttaacacaggctaaggaccagcttctttgggagagaacagacgcaggggcgggagggaaaaagggagaggcagacgtcacttcctcttggcgactctggcagcagattggtcggttgagtggcagaaaggcagacggggactgggcaaggcactgtcggtgacatcacggacagggcgacttctatgtagatgaggcagcgcagaggctgctgcttcgccacttgctgcttcgccacgaagggagttcccgtgccctgggagcgggttcaggaccgctgatcggaagtgagaatcccagctgtgtgtcagggctggaaagggctcgggagtgcgcggggcaagtgaccgtgtgtgtaaagagtgaggcgtatgaggctgtgtcggggcagaggcacaacgtttcaatgatagggacttagggtgatagaagtgcaaagcatgactgtcaaatttttggagcaggttttctgacttcggtcggaaaacccctactttctggagtttcaaaaacagaccgtacgccaagggtcatgtcttttttcgtattggtttgtgtcttagttgttaatcctacagtggaggcctggggaataagaagtaacatgtggcctgcacgccataggagaaaaagcgagcatcagccgtatcggctttgtaacacaaattagctatcgtgaagtccgctcagctcttccatttctaccctggctgctttttgcagggattggtccgtggtctccagtctcttgggttctcaccctgtgtgaaaatcttcgtgtttttccctaccccccaagtcacctcttacacagcctctgcttccaagcgcagcccccacaggagtttgtaggatttctgtgctagcggggagtgtgttctcacctcatagagccaggtagaaattatgcagatgggcgctgttctctgggaagaaagcagggcctttggggctctcagtgtccccgttgggttgtagacataacactctta

SEQ ID NO: 372 - DNA, 891 bp, synthetic construct
  source 1..891: mol_type = other DNA
tttcttttgtaatccgaaacattctagtctgcgaattaaaagccattatttgaagaaggatgccccggctccatctggccaccgaaagattgctccttaacacaggctaaggaccagcttctttgggagagaacagacgcaggggcgggagggaaaaagggagaggcagacgtcacttcctcttggcgactctggcagcagattggtcggttgagtggcagaaaggcagacggggactgggcaaggcactgtcggtgacatcacggacagggcgacttctatgtagatgaggcagcgcagaggctgctgcttcgccacttgctgcttcgccacgaagggagttcccgtgccctgggagcgggttcaggaccgctgatcggaagtgagaatcccagctgtgtgtcagggctggaaagggctcgggagtgcgcggggcaagtgaccgtgtgtgtaaagagtgaggcgtatgaggctgtgtcggggcagaggcacaacgtttcaatgatagggacttagggtgatagaagtgcaaagcatgactgtcaaatttttggagcaggttttctgacttcggtcggaaaacccctcctccggggatacaacgtgtttcctaaaagtagagggaggtaagagacggtagcacctgcggggcggcttgcacgccgagtgcctgtgacgcgccggcttaacttaactgcttccctgaagtaccttgaggttcctgatgtgcgggcggtagacggtaggcttatgcggcacgctgtcgtttccaccgtggctactgcgctttgggaaggccacgacctcctcctttggggaggtccttaggatctcagcttggcagtcgagtgggtggcgaccttttaaaggaatgggacccacccggagttc

SEQ ID NO: 373 - DNA, 1079 bp, synthetic construct
  source 1..1079: mol_type = other DNA
tttcttttgtaatccgaaacattctagtctgcgaattaaaagccattatttgaagaaggatgccccggctccatctggccaccgaaagattgctccttaacacaggctaaggaccagcttctttgggagagaacagacgcaggggcgggagggaaaaagggagaggcagacgtcacttcctcttggcgactctggcagcagattggtcggttgagtggcagaaaggcagacggggactgggcaaggcactgtcggtgacatcacggacagggcgacttctatgtagatgaggcagcgcagaggctgctgcttcgccacttgctgcttcgccacgaagggagttcccgtgccctgggagcgggttcaggaccgctgatcggaagtgagaatcccagctgtgtgtcagggctggaaagggctcgggagtgcgcggggcaagtgaccgtgtgtgtaaagagtgaggcgtatgaggctgtgtcggggcagaggcacaacgtttcaatgatagggacttagggtgatagaagtgcaaagcatgactgtcaaatttttggagcaggttttctgacttcggtcggaaaacccctttcccttcttgtaatacaaaataataacaaccacagaggacatcgcaagtaaaatgtgtataacaaccccatctaaagaaccctatcatctttctactatctgtctacctaaatatgtatagtataaataaccctatatagcactctaagcaacttaagttaggtaacttagaaaactcttttttttttttgagactgagtctcactctgtcgcacccaggctggagtgcagtggcgtgatctcggctcactgcaacctccaccttctgggttcaagtgattctcccatctcagtctcccaagtagctgggattacaggcacgccaccatgccctgctacatttttttttttttagtagagatgaggtttcaccacattggccaggctgttctcgaactcctgacctcaggtgatccgcccaccttggcctcatgaagtgctgggattacaggtgtgagccactgtacccagccagaaaactcttaaaaaac

SEQ ID NO: 374 - DNA, 969 bp, synthetic construct
  source 1..969: mol_type = other DNA
tttcttttgtaatccgaaacattctagtctgcgaattaaaagccattatttgaagaaggatgccccggctccatctggccaccgaaagattgctccttaacacaggctaaggaccagcttctttgggagagaacagacgcaggggcgggagggaaaaagggagaggcagacgtcacttcctcttggcgactctggcagcagattggtcggttgagtggcagaaaggcagacggggactgggcaaggcactgtcggtgacatcacggacagggcgacttctatgtagatgaggcagcgcagaggctgctgcttcgccacttgctgcttcgccacgaagggagttcccgtgccctgggagcgggttcaggaccgctgatcggaagtgagaatcccagctgtgtgtcagggctggaaagggctcgggagtgcgcggggcaagtgaccgtgtgtgtaaagagtgaggcgtatgaggctgtgtcggggcagaggcacaacgtttcaatgatagggacttagggtgatagaagtgcaaagcatgactgtcaaatttttggagcaggttttctgacttcggtcggaaaacccctctgaattttcttgcagttgaacaacagaggctttttttgtgtgtgtgggggtgcttggttttgggaggttgaagagtacttgttcgcaaactctctaaatgagagatggggaagtgtcttaccagctgattcgcgagagcacctgcaagtttacctgttttagtgatttgcgtttatgaaagttggagttgctgattttgtgatctctacttttaaggtaaaagcagggcggtgttgacttttcttgccagttggctgtcctgttttctttctcgcactgttttctttttgagacgaagtctgtcgctcaggctggagtgcactggcgtgatctcggctcgctgcaaactttgccgaacccctgtttagcgatttccgtttg

SEQ ID NO: 375 - DNA, 1087 bp, synthetic construct
  source 1..1087: mol_type = other DNA
tttcttttgtaatccgaaacattctagtctgcgaattaaaagccattatttgaagaaggatgccccggctccatctggccaccgaaagattgctccttaacacaggctaaggaccagcttctttgggagagaacagacgcaggggcgggagggaaaaagggagaggcagacgtcacttcctcttggcgactctggcagcagattggtcggttgagtggcagaaaggcagacggggactgggcaaggcactgtcggtgacatcacggacagggcgacttctatgtagatgaggcagcgcagaggctgctgcttcgccacttgctgcttcgccacgaagggagttcccgtgccctgggagcgggttcaggaccgctgatcggaagtgagaatcccagctgtgtgtcagggctggaaagggctcgggagtgcgcggggcaagtgaccgtgtgtgtaaagagtgaggcgtatgaggctgtgtcggggcagaggcacaacgtttcaatgatagggacttagggtgatagaagtgcaaagcatgactgtcaaatttttggagcaggttttctgacttcggtcggaaaacccctatatgtggtaatccaacaatagaaattatttttaagtttgtgtgttcctttttctgttcaatggtgcttttgatattgttgtaaagcagtgactagcagattctgtgtggtaaaagcactgaaccctgtttagttcttttctccctaccttattggtaattatttctgtgtatatatgttccaaagaaatgcggcttgtatattcatgcttttcaactttttgtgatagacagttgatacacaagtagtacctcctccgggatcttcttagtcaagactgtttggtagatgcatgttttttgttacttgtaatgtacagtattcagttcattttctttttgcagcactgtccggttgaaacacaacgcgaggatcgggcgtggtggctcacgcctgtaatcccagcactttgggaggccgaggcaggacaatcaagaccaatcctggtcatcaaggcaggagaatcaagaccatcgaggtcaggagatcaagaccatcct

SEQ ID NO: 376 - DNA, 1085 bp, synthetic construct
  source 1..1085: mol_type = other DNA
tttcttttgtaatccgaaacattctagtctgcgaattaaaagccattatttgaagaaggatgccccggctccatctggccaccgaaagattgctccttaacacaggctaaggaccagcttctttgggagagaacagacgcaggggcgggagggaaaaagggagaggcagacgtcacttcctcttggcgactctggcagcagattggtcggttgagtggcagaaaggcagacggggactgggcaaggcactgtcggtgacatcacggacagggcgacttctatgtagatgaggcagcgcagaggctgctgcttcgccacttgctgcttcgccacgaagggagttcccgtgccctgggagcgggttcaggaccgctgatcggaagtgagaatcccagctgtgtgtcagggctggaaagggctcgggagtgcgcggggcaagtgaccgtgtgtgtaaagagtgaggcgtatgaggctgtgtcggggcagaggcacaacgtttcaatgatagggacttagggtgatagaagtgcaaagcatgactgtcaaatttttggagcaggttttctgacttcggtcggaaaacccctacatcaggttgtttttctgtttttacatcaggttgtttttctgtttggttttttttttacaccacgtttatacgccggtgcacggtttaccactgaaaacacctttcatctacaggtgatatcttttaacacaaataaaatgtagtagtcctaggagacggaatagaaggaggtggggcctaggcagattcatctctgcggtgcattttgcctctggccctcgggccctagtttgcgatctttcccatcttgcctctgcttccctctgcacaatcctgagtattgcagtaccttacacttaaggaaatttcgtcttgccaaagttgatccatttcagctccgaaacataacaggaactagtgcaacgataaacgtatgaggaacttgcaataagagtgacagaatcctttgaatcaaaaaaaaaaaaagccaccacttaatgagtatctaccatatgtcaagggcttcaccaatatttcattgaaatattccagacca

SEQ ID NO: 377 - DNA, 1087 bp, synthetic construct
  source 1..1087: mol_type = other DNA
tttcttttgtaatccgaaacattctagtctgcgaattaaaagccattatttgaagaaggatgccccggctccatctggccaccgaaagattgctccttaacacaggctaaggaccagcttctttgggagagaacagacgcaggggcgggagggaaaaagggagaggcagacgtcacttcctcttggcgactctggcagcagattggtcggttgagtggcagaaaggcagacggggactgggcaaggcactgtcggtgacatcacggacagggcgacttctatgtagatgaggcagcgcagaggctgctgcttcgccacttgctgcttcgccacgaagggagttcccgtgccctgggagcgggttcaggaccgctgatcggaagtgagaatcccagctgtgtgtcagggctggaaagggctcgggagtgcgcggggcaagtgaccgtgtgtgtaaagagtgaggcgtatgaggctgtgtcggggcagaggcacaacgtttcaatgatagggacttagggtgatagaagtgcaaagcatgactgtcaaatttttggagcaggttttctgacttcggtcggaaaacccctcttatgatgtttgttgccaatgatagattgttttcactgtgcaaaaattatgggtagttttggtggtcttgatgcagttgtaagcttggggtatgaaggtttgggccacgcctgggcgcttccggctgcgccggatgctgtttcctttccgctcccaggggcgttgggaacggttgtaggacgtggctctttattcgtgagttttccatttacctccgctgaacctagagcttcagacgccctatggcgtccgcctcgacccaaccggcggccttgagcgctgagcaagcaaagggtgagaatcgtcctagtcaaggcataggctgctggcctggggtagtcaaggcatgggctgctggtctggggaggatgcgggcggaggatgtggggcgacaaacctggctacgtccgccgggaaaatggggtaggggacgccgggtaccgtccttctaagtggggcgcttgcccccaagacttgggatcttattgggttacctaca

SEQ ID NO: 378 - DNA, 1085 bp, synthetic construct
  source 1..1085: mol_type = other DNA
tttcttttgtaatccgaaacattctagtctgcgaattaaaagccattatttgaagaaggatgccccggctccatctggccaccgaaagattgctccttaacacaggctaaggaccagcttctttgggagagaacagacgcaggggcgggagggaaaaagggagaggcagacgtcacttcctcttggcgactctggcagcagattggtcggttgagtggcagaaaggcagacggggactgggcaaggcactgtcggtgacatcacggacagggcgacttctatgtagatgaggcagcgcagaggctgctgcttcgccacttgctgcttcgccacgaagggagttcccgtgccctgggagcgggttcaggaccgctgatcggaagtgagaatcccagctgtgtgtcagggctggaaagggctcgggagtgcgcggggcaagtgaccgtgtgtgtaaagagtgaggcgtatgaggctgtgtcggggcagaggcacaacgtttcaatgatagggacttagggtgatagaagtgcaaagcatgactgtcaaatttttggagcaggttttctgacttcggtcggaaaaccccttctttactgttatatgttaggcgaaatattacgcgtttggagtaagtggtgctttttgtaactgaaaagagattctgtgtgtgtttttttttttttagaggctgcatagttatttgtatgaaccgcaggtgacctaattagcaaggtaattcagacctgtatcctagcacttaagaagtggaagtgggataaccctgcgtgttctcgtgtgggaggctagcttaagcaacaaagcaggaaggccccaccaacaaaagaatttaaaaattatacgtgcgtggtggcgcgcgtatgaggaaattatttggcaactgtgttacagtatagcagcaaatggaatagacctagtccctgactttaggagacctgcctcagccccccgaatggctgggactacaggcgtgcgcctccgcgcccagctaatttttgcatttttggtagagacgggttcaccatgttggccaggatggtctccatctcttcatctggtgatccgcc

SEQ ID NO: 379 - DNA, 1087 bp, synthetic construct
  source 1..1087: mol_type = other DNA
tttcttttgtaatccgaaacattctagtctgcgaattaaaagccattatttgaagaaggatgccccggctccatctggccaccgaaagattgctccttaacacaggctaaggaccagcttctttgggagagaacagacgcaggggcgggagggaaaaagggagaggcagacgtcacttcctcttggcgactctggcagcagattggtcggttgagtggcagaaaggcagacggggactgggcaaggcactgtcggtgacatcacggacagggcgacttctatgtagatgaggcagcgcagaggctgctgcttcgccacttgctgcttcgccacgaagggagttcccgtgccctgggagcgggttcaggaccgctgatcggaagtgagaatcccagctgtgtgtcagggctggaaagggctcgggagtgcgcggggcaagtgaccgtgtgtgtaaagagtgaggcgtatgaggctgtgtcggggcagaggcacaacgtttcaatgatagggacttagggtgatagaagtgcaaagcatgactgtcaaatttttggagcaggttttctgacttcggtcggaaaacccctaccttattcacgcctaaaaagtagactgactgtggggtggtcgtgttttttgtttcttgttggtaggtggtgaatgcgtttttttcgttgttttctccgttactcaggctgccagttgcttggcagtcttgtcgctggctgtggacgctctgcacttcatcaccgtccccagctgcgctttgagccggtctaaggttgcccacagtattgacgttgggacccacgaaactggcaatttccatgtgtgcggccttacccagttctcccaaacttctgcgtataaccgcttctctgtgcttcagaaagataagtccggccccggcctcacacagcagctcagttcgtgacagcgtttaatatgtaaaatggagcaaataatttatagggcgttgggagagttaaagagactaattcatttacgtgttaaatacagggaatggcttttgcattgatataaccccagcctccagcatgcgccagacctgacgtaggtgttcggc

SEQ ID NO: 380 - DNA, 1087 bp, synthetic construct
  source 1..1087: mol_type = other DNA
tttcttttgtaatccgaaacattctagtctgcgaattaaaagccattatttgaagaaggatgccccggctccatctggccaccgaaagattgctccttaacacaggctaaggaccagcttctttgggagagaacagacgcaggggcgggagggaaaaagggagaggcagacgtcacttcctcttggcgactctggcagcagattggtcggttgagtggcagaaaggcagacggggactgggcaaggcactgtcggtgacatcacggacagggcgacttctatgtagatgaggcagcgcagaggctgctgcttcgccacttgctgcttcgccacgaagggagttcccgtgccctgggagcgggttcaggaccgctgatcggaagtgagaatcccagctgtgtgtcagggctggaaagggctcgggagtgcgcggggcaagtgaccgtgtgtgtaaagagtgaggcgtatgaggctgtgtcggggcagaggcacaacgtttcaatgatagggacttagggtgatagaagtgcaaagcatgactgtcaaatttttggagcaggttttctgacttcggtcggaaaaccccttttgacccattacccatctaagttagatgcttttttaaatgttttttaatttttaaatttttaatttttttcattatttattttttatttttgagacggatctcggctcactgtaacctccacctcccgggttcaagcgattctcctgactcagcctcccgagtagctgggattacaggcgcgcgccaccatgcccggctaatttttctatttttagtaaagacggggtttcgccatgttgaccagggtggtcttgaactcctgacgtcaggtgatcctcctgcctcgtgctgggattgcaggcgtgagccaccgctcccggcccttagatgctttttaatcagcaagtacgcaatgctttcctgacaggaatgtcaagtccgtcaggaaatccacataagggtgttaagcaggcaaagtaccacatacagattaaaatcaaaagcactgtcaacgcttatttaatttatacagtagaccctaacttttctaattttgtg

SEQ ID NO: 381 - DNA, 1087 bp, synthetic construct
  source 1..1087: mol_type = other DNA
tttcttttgtaatccgaaacattctagtctgcgaattaaaagccattatttgaagaaggatgccccggctccatctggccaccgaaagattgctccttaacacaggctaaggaccagcttctttgggagagaacagacgcaggggcgggagggaaaaagggagaggcagacgtcacttcctcttggcgactctggcagcagattggtcggttgagtggcagaaaggcagacggggactgggcaaggcactgtcggtgacatcacggacagggcgacttctatgtagatgaggcagcgcagaggctgctgcttcgccacttgctgcttcgccacgaagggagttcccgtgccctgggagcgggttcaggaccgctgatcggaagtgagaatcccagctgtgtgtcagggctggaaagggctcgggagtgcgcggggcaagtgaccgtgtgtgtaaagagtgaggcgtatgaggctgtgtcggggcagaggcacaacgtttcaatgatagggacttagggtgatagaagtgcaaagcatgactgtcaaatttttggagcaggttttctgacttcggtcggaaaacccctgtttacttggttttaaaaatagcttgcactagcgataccgcgaatatggttattaggtttgttaggcacagtcgtgtcttactatagaaaaataacgtagtgttcattttgctgcctgtatgtgttaatttgtccttattgcgccattgttcttgttaagtcttctgtaaggagttgcgggtttcaaactgtcagtctgagagcataagctcacttttcagtcagttgaattgaatgttacattcgattggttctggatattgatattacccaaggcttgtcctgtttgtaagtcttttcctacacctgacaatatgattatgtttacaatgtccctagaactctgggtgtatcgttcccactgaataaaatttgatctctaagttgacctataaatttaagtaccaaaaaactggtttgtaagattttggaaggcagaggcagggaagagaccaacgtggtctacatataaagtaccaggtacatataaagtaccaggt

SEQ ID NO: 382 - DNA, 1083 bp, synthetic construct
  source 1..1083: mol_type = other DNA
tttcttttgtaatccgaaacattctagtctgcgaattaaaagccattatttgaagaaggatgccccggctccatctggccaccgaaagattgctccttaacacaggctaaggaccagcttctttgggagagaacagacgcaggggcgggagggaaaaagggagaggcagacgtcacttcctcttggcgactctggcagcagattggtcggttgagtggcagaaaggcagacggggactgggcaaggcactgtcggtgacatcacggacagggcgacttctatgtagatgaggcagcgcagaggctgctgcttcgccacttgctgcttcgccacgaagggagttcccgtgccctgggagcgggttcaggaccgctgatcggaagtgagaatcccagctgtgtgtcagggctggaaagggctcgggagtgcgcggggcaagtgaccgtgtgtgtaaagagtgaggcgtatgaggctgtgtcggggcagaggcacaacgtttcaatgatagggacttagggtgatagaagtgcaaagcatgactgtcaaatttttggagcaggttttctgacttcggtcggaaaacccctatttttgtggtgctaaaagttagattgcattccgcccttctcacgtctctttacgtgttgtttgcgaggcgtggcctcggaggtaaatggtctccttttacctcagataagcttacctttgctctgtgagtaagaatgtagctacacttccaaatttagctattgtcctttgcggtccaaatgaaaatattaccttccgatctaacaatgttaaactagtcccaggcccttctatcgattgccagaatagactagactactacacagacacaccctctcaaatcaggccagctcctgcaacctgcacctacagtttgtcccctgggacaaatgaaaggacaggccctctttcccccccccccccaaatcagagcacacacagatcttggggtctggggcagaaatttcgttcatggaaaaaacaaacaaacaaacaaacacgatcaaaggaagctcgttccctttggcctcagggtttcttagacgccgtgttccc

SEQ ID NO: 383 - DNA, 1084 bp, synthetic construct
  source 1..1084: mol_type = other DNA
tttcttttgtaatccgaaacattctagtctgcgaattaaaagccattatttgaagaaggatgccccggctccatctggccaccgaaagattgctccttaacacaggctaaggaccagcttctttgggagagaacagacgcaggggcgggagggaaaaagggagaggcagacgtcacttcctcttggcgactctggcagcagattggtcggttgagtggcagaaaggcagacggggactgggcaaggcactgtcggtgacatcacggacagggcgacttctatgtagatgaggcagcgcagaggctgctgcttcgccacttgctgcttcgccacgaagggagttcccgtgccctgggagcgggttcaggaccgctgatcggaagtgagaatcccagctgtgtgtcagggctggaaagggctcgggagtgcgcggggcaagtgaccgtgtgtgtaaagagtgaggcgtatgaggctgtgtcggggcagaggcacaacgtttcaatgatagggacttagggtgatagaagtgcaaagcatgactgtcaaatttttggagcaggttttctgacttcggtcggaaaacccctataactggtaaccaaaagcagattactttcccccttgtggtcttcgcgtttgcggacgggagagaactttcggccattttccttttagaaatttaacttcttgaaggccaccaggtgacccttacttccctctcacctttccttctacctgtactttctctattaaaaagcctgcagaagtacccttgacaaattgccaaaaatgacacctaaaaaaaaaaaaaggaaaaacgacaccttaggtaattataggttgtaagaaaaagatttgacctcttggagtttttatttcttaataccaaaggacacccaaggaacgtatctctcaaaattgggtttcaaacctcagccgtttccttcttagttccagtgcttaacacgcaacagacctgcacaccactacactgcatacgagttttaaagttaataaatcagtcacccctccatagtcttctacctacttgaagacagaaacggctgctaggaagcaattcttc

SEQ ID NO: 384 - DNA, 1087 bp, synthetic construct
  source 1..1087: mol_type = other DNA
tttcttttgtaatccgaaacattctagtctgcgaattaaaagccattatttgaagaaggatgccccggctccatctggccaccgaaagattgctccttaacacaggctaaggaccagcttctttgggagagaacagacgcaggggcgggagggaaaaagggagaggcagacgtcacttcctcttggcgactctggcagcagattggtcggttgagtggcagaaaggcagacggggactgggcaaggcactgtcggtgacatcacggacagggcgacttctatgtagatgaggcagcgcagaggctgctgcttcgccacttgctgcttcgccacgaagggagttcccgtgccctgggagcgggttcaggaccgctgatcggaagtgagaatcccagctgtgtgtcagggctggaaagggctcgggagtgcgcggggcaagtgaccgtgtgtgtaaagagtgaggcgtatgaggctgtgtcggggcagaggcacaacgtttcaatgatagggacttagggtgatagaagtgcaaagcatgactgtcaaatttttggagcaggttttctgacttcggtcggaaaacccctctggggaataagagtggtttaaagaaagaacaatttgagagatctgcttagatctaataaaacccaagtatagtttctttagacgtcttatatctcacgtaggacctcttatttcagactcactgcaagaacaagctaaagaactatatacagtcaggaacaaggtgagccatcgcggttctcagtcccatgatcttaagagtttttcctcttcccctcttccctggctgtcctggagctcactctgtagaccaggctggtctcaaactcagaaatccacttacctctgcctcccaagggctgggattaaaggcatgcaccaccattgcccggcagggtatgtggactatgctgtccttcaactcagagatcgtggtactttaaatctcattttccgaaagaaaagaaaagaaaggaaggggggaaataaagccagtatattttgcacccacaatctgaagttctacaaatattgttagaaaatgcaaaggacccaagtc

SEQ ID NO: 385 - DNA, 1087 bp, synthetic construct
  source 1..1087: mol_type = other DNA
tttcttttgtaatccgaaacattctagtctgcgaattaaaagccattatttgaagaaggatgccccggctccatctggccaccgaaagattgctccttaacacaggctaaggaccagcttctttgggagagaacagacgcaggggcgggagggaaaaagggagaggcagacgtcacttcctcttggcgactctggcagcagattggtcggttgagtggcagaaaggcagacggggactgggcaaggcactgtcggtgacatcacggacagggcgacttctatgtagatgaggcagcgcagaggctgctgcttcgccacttgctgcttcgccacgaagggagttcccgtgccctgggagcgggttcaggaccgctgatcggaagtgagaatcccagctgtgtgtcagggctggaaagggctcgggagtgcgcggggcaagtgaccgtgtgtgtaaagagtgaggcgtatgaggctgtgtcggggcagaggcacaacgtttcaatgatagggacttagggtgatagaagtgcaaagcatgactgtcaaatttttggagcaggttttctgacttcggtcggaaaacccctctcggtttatcttaaagggttttaaatatagaaagcttccttagtcttatgggtgagagtgctgtttaagccttacctaggtatgtctttgaacatttattacagattgttatttgtgactatgaccactcaggtgttctgttcttgtgaatttagacacactcagaaaggctacacactcaaagaccacaccaaagtgaagtactatctgggccgtgaaactggtcacatatcagttattttgcagtaaaacaaggaagtcaatcatactgcttcagtgggtcagggagtcaagaatgcacagtacaagagctggtgagattcctcagcaggtaagagcactgaatgctcttccaaagattctgagttcaaatcccagcaaccacgtggtggatttgaacaaaggatgaaaacaaccatccataaccagatctgatgccctcttctggagtgtcaaaagacagctatggtgtacttacataaataaataagtaaaaaca

SEQ ID NO: 386 - DNA, 1087 bp, synthetic construct
  source 1..1087: mol_type = other DNA
tttcttttgtaatccgaaacattctagtctgcgaattaaaagccattatttgaagaaggatgccccggctccatctggccaccgaaagattgctccttaacacaggctaaggaccagcttctttgggagagaacagacgcaggggcgggagggaaaaagggagaggcagacgtcacttcctcttggcgactctggcagcagattggtcggttgagtggcagaaaggcagacggggactgggcaaggcactgtcggtgacatcacggacagggcgacttctatgtagatgaggcagcgcagaggctgctgcttcgccacttgctgcttcgccacgaagggagttcccgtgccctgggagcgggttcaggaccgctgatcggaagtgagaatcccagctgtgtgtcagggctggaaagggctcgggagtgcgcggggcaagtgaccgtgtgtgtaaagagtgaggcgtatgaggctgtgtcggggcagaggcacaacgtttcaatgatagggacttagggtgatagaagtgcaaagcatgactgtcaaatttttggagcaggttttctgacttcggtcggaaaacccctccacattttgtgtttaaaaatagaaatatttaagtgagatcagtttaaatctgctttatctagggtgtctaactgcttgcatctttttaacttttccttatttgtgagaaggtctgtaaaacttattatatgttagtacactgtagctgtcttcagacactccagaagagggattcagatcaccttacagatggttttgagccaccatgtggttgctgggatttgaactcaggacctttagaaaagtagttgggtgctcttacccgctgagccatctcaccagccctttttttttcttttttccagttcgggtttctctgtgtgtagccctggctgtcctggaactcattctgtagaccgggctggcctcgaactcagaaatctgcctgcctctgcctcccaagtgctgggattaaaggaatgtgccttcattgcccggctctagggctttttgttgttgtttgtttgtttgtttgtttgtttgcttttgtggatggcct

SEQ ID NO: 387 - DNA, 1087 bp, synthetic construct
  source 1..1087: mol_type = other DNA
tttcttttgtaatccgaaacattctagtctgcgaattaaaagccattatttgaagaaggatgccccggctccatctggccaccgaaagattgctccttaacacaggctaaggaccagcttctttgggagagaacagacgcaggggcgggagggaaaaagggagaggcagacgtcacttcctcttggcgactctggcagcagattggtcggttgagtggcagaaaggcagacggggactgggcaaggcactgtcggtgacatcacggacagggcgacttctatgtagatgaggcagcgcagaggctgctgcttcgccacttgctgcttcgccacgaagggagttcccgtgccctgggagcgggttcaggaccgctgatcggaagtgagaatcccagctgtgtgtcagggctggaaagggctcgggagtgcgcggggcaagtgaccgtgtgtgtaaagagtgaggcgtatgaggctgtgtcggggcagaggcacaacgtttcaatgatagggacttagggtgatagaagtgcaaagcatgactgtcaaatttttggagcaggttttctgacttcggtcggaaaacccctaaaaccagtaagggagaaaggtcaagtaacatataaaggaaggcctatcagaattacaccagacttttcaccagagactatgaaagccagaagagcctggacagatgttatacagacactaagagaacacaaatgccagcccaggctactatacctggccaaactctcaattaccatagatggagaaaccaaagtattccacgacaaaaacaaattcacacaatatctttccacgaatccagcccttcaaaggataatgacagaaaagaagcaatacaaggacggaaatcacgccctagaacaaccaagaaactaatcattcaacaaaccaaaaagaagacagccacaagaacagaatgccaactctaacaacaaaaataaaaggaagcaacaattacttttccttaatatctcttaatatcaatggactcaattccccaataaaaagacatagactaacagactggctacacaaacaggacccaacattctgctgctta

SEQ ID NO: 388 - DNA, 1087 bp, synthetic construct
  source 1..1087: mol_type = other DNA
tttcttttgtaatccgaaacattctagtctgcgaattaaaagccattatttgaagaaggatgccccggctccatctggccaccgaaagattgctccttaacacaggctaaggaccagcttctttgggagagaacagacgcaggggcgggagggaaaaagggagaggcagacgtcacttcctcttggcgactctggcagcagattggtcggttgagtggcagaaaggcagacggggactgggcaaggcactgtcggtgacatcacggacagggcgacttctatgtagatgaggcagcgcagaggctgctgcttcgccacttgctgcttcgccacgaagggagttcccgtgccctgggagcgggttcaggaccgctgatcggaagtgagaatcccagctgtgtgtcagggctggaaagggctcgggagtgcgcggggcaagtgaccgtgtgtgtaaagagtgaggcgtatgaggctgtgtcggggcagaggcacaacgtttcaatgatagggacttagggtgatagaagtgcaaagcatgactgtcaaatttttggagcaggttttctgacttcggtcggaaaacccctcccaatttcactggtctacaatgaaagcaaaacagttctcttccccgctccccggtgtgtgagaggggctttgatccttctctggtttcctaggaaacgcgtatgtgctagagccacgctctgagacttccgcctcgtgcggtcccgcttcctttctgcctcctctggcctgcatccgtgggggaggtggctggctgcagggttctccggatctcttctgtgttcccactactcaagcaccgagtggcgttctatggcgtccgcctcggctcagcccgcggccctgagcgcggagcaggccaagggtgaggaaagagcctagtctgggtgtgggccgtcttctggggggagggcgcgatactattctttgcctctccaagtggggcccttgcccattagggcgaagggttgggaggacaagcttatcgggttgcttgcaggcctcggcccactaattccctgcctcttccctcctctgggctcgcccgccgtcctccgcg

SEQ ID NO: 389 - DNA, 1087 bp, synthetic construct
  source 1..1087: mol_type = other DNA
tttcttttgtaatccgaaacattctagtctgcgaattaaaagccattatttgaagaaggatgccccggctccatctggccaccgaaagattgctccttaacacaggctaaggaccagcttctttgggagagaacagacgcaggggcgggagggaaaaagggagaggcagacgtcacttcctcttggcgactctggcagcagattggtcggttgagtggcagaaaggcagacggggactgggcaaggcactgtcggtgacatcacggacagggcgacttctatgtagatgaggcagcgcagaggctgctgcttcgccacttgctgcttcgccacgaagggagttcccgtgccctgggagcgggttcaggaccgctgatcggaagtgagaatcccagctgtgtgtcagggctggaaagggctcgggagtgcgcggggcaagtgaccgtgtgtgtaaagagtgaggcgtatgaggctgtgtcggggcagaggcacaacgtttcaatgatagggacttagggtgatagaagtgcaaagcatgactgtcaaatttttggagcaggttttctgacttcggtcggaaaacccctgaatttgttaaattacaggaggaagcttttttagttcattttacaaatactttcttgttaggtagataataccttctaaggttattatctggatcttctaagtctttttatcgctagcaagtctaagtttctggactttggaattagaagttaatgtcgtaggcgggcatggtggtccacgcctttaatcccagagtttgggaggcagacgcaggtggttttctgagttcgaggccatcctgctcttcaatgttagttccaggacagccagggttatacaaagaaaccctgtctcgagaaacaaaacaaacaaaaaaagagtagctgagtgctctgagttgtctctccagccccttagctatttattttcatttaaattatttttgttttattcgcttgtgtgcctgagtttgaatttcccgggattaacagttgaagactagggctggtgagatggctcagcggttaagattgccgactgctcttccaaaggtcctgag

SEQ ID NO: 390 - DNA, 1087 bp, synthetic construct
  source 1..1087: mol_type = other DNA
tttcttttgtaatccgaaacattctagtctgcgaattaaaagccattatttgaagaaggatgccccggctccatctggccaccgaaagattgctccttaacacaggctaaggaccagcttctttgggagagaacagacgcaggggcgggagggaaaaagggagaggcagacgtcacttcctcttggcgactctggcagcagattggtcggttgagtggcagaaaggcagacggggactgggcaaggcactgtcggtgacatcacggacagggcgacttctatgtagatgaggcagcgcagaggctgctgcttcgccacttgctgcttcgccacgaagggagttcccgtgccctgggagcgggttcaggaccgctgatcggaagtgagaatcccagctgtgtgtcagggctggaaagggctcgggagtgcgcggggcaagtgaccgtgtgtgtaaagagtgaggcgtatgaggctgtgtcggggcagaggcacaacgtttcaatgatagggacttagggtgatagaagtgcaaagcatgactgtcaaatttttggagcaggttttctgacttcggtcggaaaacccctaccccctaattctacaagaatagaaagcttagcagctcctctgaatggttgctctcaggtgctagtggttgcaagtcgtatgttgatgcctgcctttgccctacctggtgtgtgagcgtgagcgcgccccacctctccagcctctctcttactgtttttcagacaagatgggactgttgttctcctactgctatgtacctcaatttcaattgatcatgcctggacataactgcccatgttgtaaggtcgtctacgttgtaaggtcgtgctcagtttctgatgcctagactagtcacctttccgtttgcctcctgactgtgtaaatgaggcaaatgaaggtggtctcttaactgacatgttagtgtttgacctatgggatagtttctcattgttgagacagaatttctagaagctggtccgctgagcggctaagagcacttgctgatattgcaaaggatctacctgggtttggttctcagcactcacatggaagttcacat

SEQ ID NO: 391 - DNA, 654 bp, synthetic construct
  source 1..654: mol_type = other DNA
tttcttttgtaatccgaaacattctagtctgcgaattaaaagccattatttgaagaaggatgccccggctccatctggccaccgaaagattgctccttaacacaggctaaggaccagcttctttgggagagaacagacgcaggggcgggagggaaaaagggagaggcagacgtcacttcctcttggcgactctggcagcagattggtcggttgagtggcagaaaggcagacggggactgggcaaggcactgtcggtgacatcacggacagggcgacttctatgtagatgaggcagcgcagaggctgctgcttcgccacttgctgcttcgccacgaagggagttcccgtgccctgggagcgggttcaggaccgctgatcggaagtgagaatcccagctgtgtgtcagggctggaaagggctcgggagtgcgcggggcaagtgaccgtgtgtgtaaagagtgaggcgtatgaggctgtgtcggggcagaggcacaacgtttcaatgatagggacttagggtgatagaagtgcaaagcatgactgtcaaatttttggagcaggttttctgacttcggtcggaaaaccccttgtagttcctgcaatttaattttcgtttaaaactttattttattctttaacttaaaaaaaatatata

SEQ ID NO: 392 - DNA, 1087 bp, synthetic construct
  source 1..1087: mol_type = other DNA
gtttcttctgtaatccgaaacattctagtctgcgaattaaaagccattatttgaagaaggatgccccggctccatctggccaccgaaaggttgctccttaacacaggctaaggaccagcttttttgggagagaacagacgcaggggcgggagggaaaaagggagaggcagacgtcacttcctcttggcggctctggcagcagattggtcagttgagtggcagaaaagcagacggggactgggcaaggcactgtcggtgacatcacggacagggcgacttctatgtagatgaggcagcgcagaggctgctgcttcgccacttgctgcttcgccacgaaggagttcccctgccctgggagcgggttcaggaccgcggatcggaagagagaatcccagctgtgtgtcagggctggaaagggctcgggagtgcgcggggcaagtgaccgtgtgtgtaaagagtgaggcgtatgaggctgtgtcggggcagagcccgaagatctcaatgatagggacttagggtgatagaagtgcaaagcatgactgtcaaatttttggagcaggttttctgacttcggtcggaaaacccctactttctggagtttcaaaaacagactgtacgccaagggtcatatctttttttgtattggtttgtgtcttggttggtgtcttaggtgttaatcctacagtggagggtttatgggaataggaagtaacatgtcgcctgcatgtcataggagaaaaagcgagcatcagccgtatcggctttgtaacacaaattagctatcgtgaagtccgctcagctcttccctttctaccctggctgctttttgcagggattggtccgtggtctccagtctcttgggttctcaccctgtgtgaaaatcttcgtgtttttccctaccccccagtcacctcttacacagcctctgcttccaagcgcagcccccacaggagtttgtaggatttctgtgctagcggggaatgtgttctcacctcatagagccaggtagaaattatgcagatgggcagttctctgggaagaaagcagggcctttggggctctcagtgtccccgttgggttgtagaca

SEQ ID NO: 393 - DNA, 1087 bp, synthetic construct
  source 1..1087: mol_type = other DNA
gtttcttctgtaatccgaaacattctagtctgcgaattaaaagccattatttgaagaaggatgccccggctccatctggccaccgaaaggttgctccttaacacaggctaaggaccagcttttttgggagagaacagacgcaggggcgggagggaaaaagggagaggcagacgtcacttcctcttggcggctctggcagcagattggtcagttgagtggcagaaaagcagacggggactgggcaaggcactgtcggtgacatcacggacagggcgacttctatgtagatgaggcagcgcagaggctgctgcttcgccacttgctgcttcgccacgaaggagttcccctgccctgggagcgggttcaggaccgcggatcggaagagagaatcccagctgtgtgtcagggctggaaagggctcgggagtgcgcggggcaagtgaccgtgtgtgtaaagagtgaggcgtatgaggctgtgtcggggcagagcccgaagatctcaatgatagggacttagggtgatagaagtgcaaagcatgactgtcaaatttttggagcaggttttctgacttcggtcggaaaacccctactttctggagtttctaaaagtagactgtacgctaagggtcatatctttttttgttttggtttgtgtcttggttggcgtcttaaatgttaatcctacagtggagggctggcgaataggaagtaacatgtcgcctgcacgccataggagaaaaagcgagcatcagccgtatcggctttgtaacacaaattagctatcgtgaagtccgctcagctcttccctttctaccctggctgctttttgcagggattggtccgtggtctccagtctcttgggttctcaccctgtgtgaaaatcttcctgtttttccctaccccccaagtcacctcttacacagcctctgcttccaagcgcagcccccacaggagtttgtaggatttctgtgctagcggggagtgtgttctcacctcatagagccaggtagaaactacgcagatgggtgctgttctccaggaagaaagcagggcctttggggctctcagtgtccccgttgggttgtaga

SEQ ID NO: 394 - DNA, 1087 bp, synthetic construct
  source 1..1087: mol_type = other DNA
gtttcttctgtaatccgaaacattctagtctgcgaattaaaagccattatttgaagaaggatgccccggctccatctggccaccgaaaggttgctccttaacacaggctaaggaccagcttttttgggagagaacagacgcaggggcgggagggaaaaagggagaggcagacgtcacttcctcttggcggctctggcagcagattggtcagttgagtggcagaaaagcagacggggactgggcaaggcactgtcggtgacatcacggacagggcgacttctatgtagatgaggcagcgcagaggctgctgcttcgccacttgctgcttcgccacgaaggagttcccctgccctgggagcgggttcaggaccgcggatcggaagagagaatcccagctgtgtgtcagggctggaaagggctcgggagtgcgcggggcaagtgaccgtgtgtgtaaagagtgaggcgtatgaggctgtgtcggggcagagcccgaagatctcaatgatagggacttagggtgatagaagtgcaaagcatgactgtcaaatttttggagcaggttttctgacttcggtcggaaaacccctactttctggagtttcaaaaacagaccgtacgccaagggtcatgtcttttttcgtattggtttgtgtcttagttgttaatcctacagtggaggcctggggaataagaagtaacatgtggcctgcacgccataggagaaaaagcgagcatcagccgtatcggctttgtaacacaaattagctatcgtgaagtccgctcagctcttccatttctaccctggctgctttttgcagggattggtccgtggtctccagtctcttgggttctcaccctgtgtgaaaatcttcgtgtttttccctaccccccaagtcacctcttacacagcctctgcttccaagcgcagcccccacaggagtttgtaggatttctgtgctagcggggagtgtgttctcacctcatagagccaggtagaaattatgcagatgggcgctgttctctgggaagaaagcagggcctttggggctctcagtgtccccgttgggttgtagacataacactctta

SEQ ID NO: 395 - DNA, 891 bp, synthetic construct
  source 1..891: mol_type = other DNA
gtttcttctgtaatccgaaacattctagtctgcgaattaaaagccattatttgaagaaggatgccccggctccatctggccaccgaaaggttgctccttaacacaggctaaggaccagcttttttgggagagaacagacgcaggggcgggagggaaaaagggagaggcagacgtcacttcctcttggcggctctggcagcagattggtcagttgagtggcagaaaagcagacggggactgggcaaggcactgtcggtgacatcacggacagggcgacttctatgtagatgaggcagcgcagaggctgctgcttcgccacttgctgcttcgccacgaaggagttcccctgccctgggagcgggttcaggaccgcggatcggaagagagaatcccagctgtgtgtcagggctggaaagggctcgggagtgcgcggggcaagtgaccgtgtgtgtaaagagtgaggcgtatgaggctgtgtcggggcagagcccgaagatctcaatgatagggacttagggtgatagaagtgcaaagcatgactgtcaaatttttggagcaggttttctgacttcggtcggaaaacccctcctccggggatacaacgtgtttcctaaaagtagagggaggtaagagacggtagcacctgcggggcggcttgcacgccgagtgcctgtgacgcgccggcttaacttaactgcttccctgaagtaccttgaggttcctgatgtgcgggcggtagacggtaggcttatgcggcacgctgtcgtttccaccgtggctactgcgctttgggaaggccacgacctcctcctttggggaggtccttaggatctcagcttggcagtcgagtgggtggcgaccttttaaaggaatgggacccacccggagttc

SEQ ID NO: 396 - DNA, 1079 bp, synthetic construct
  source 1..1079: mol_type = other DNA
gtttcttctgtaatccgaaacattctagtctgcgaattaaaagccattatttgaagaaggatgccccggctccatctggccaccgaaaggttgctccttaacacaggctaaggaccagcttttttgggagagaacagacgcaggggcgggagggaaaaagggagaggcagacgtcacttcctcttggcggctctggcagcagattggtcagttgagtggcagaaaagcagacggggactgggcaaggcactgtcggtgacatcacggacagggcgacttctatgtagatgaggcagcgcagaggctgctgcttcgccacttgctgcttcgccacgaaggagttcccctgccctgggagcgggttcaggaccgcggatcggaagagagaatcccagctgtgtgtcagggctggaaagggctcgggagtgcgcggggcaagtgaccgtgtgtgtaaagagtgaggcgtatgaggctgtgtcggggcagagcccgaagatctcaatgatagggacttagggtgatagaagtgcaaagcatgactgtcaaatttttggagcaggttttctgacttcggtcggaaaacccctttcccttcttgtaatacaaaataataacaaccacagaggacatcgcaagtaaaatgtgtataacaaccccatctaaagaaccctatcatctttctactatctgtctacctaaatatgtatagtataaataaccctatatagcactctaagcaacttaagttaggtaacttagaaaactcttttttttttttgagactgagtctcactctgtcgcacccaggctggagtgcagtggcgtgatctcggctcactgcaacctccaccttctgggttcaagtgattctcccatctcagtctcccaagtagctgggattacaggcacgccaccatgccctgctacatttttttttttttagtagagatgaggtttcaccacattggccaggctgttctcgaactcctgacctcaggtgatccgcccaccttggcctcatgaagtgctgggattacaggtgtgagccactgtacccagccagaaaactcttaaaaaac

SEQ ID NO: 397 - DNA, 969 bp, synthetic construct
  source 1..969: mol_type = other DNA
gtttcttctgtaatccgaaacattctagtctgcgaattaaaagccattatttgaagaaggatgccccggctccatctggccaccgaaaggttgctccttaacacaggctaaggaccagcttttttgggagagaacagacgcaggggcgggagggaaaaagggagaggcagacgtcacttcctcttggcggctctggcagcagattggtcagttgagtggcagaaaagcagacggggactgggcaaggcactgtcggtgacatcacggacagggcgacttctatgtagatgaggcagcgcagaggctgctgcttcgccacttgctgcttcgccacgaaggagttcccctgccctgggagcgggttcaggaccgcggatcggaagagagaatcccagctgtgtgtcagggctggaaagggctcgggagtgcgcggggcaagtgaccgtgtgtgtaaagagtgaggcgtatgaggctgtgtcggggcagagcccgaagatctcaatgatagggacttagggtgatagaagtgcaaagcatgactgtcaaatttttggagcaggttttctgacttcggtcggaaaacccctctgaattttcttgcagttgaacaacagaggctttttttgtgtgtgtgggggtgcttggttttgggaggttgaagagtacttgttcgcaaactctctaaatgagagatggggaagtgtcttaccagctgattcgcgagagcacctgcaagtttacctgttttagtgatttgcgtttatgaaagttggagttgctgattttgtgatctctacttttaaggtaaaagcagggcggtgttgacttttcttgccagttggctgtcctgttttctttctcgcactgttttctttttgagacgaagtctgtcgctcaggctggagtgcactggcgtgatctcggctcgctgcaaactttgccgaacccctgtttagcgatttccgtttg

SEQ ID NO: 398 - DNA, 1087 bp, synthetic construct
  source 1..1087: mol_type = other DNA
gtttcttctgtaatccgaaacattctagtctgcgaattaaaagccattatttgaagaaggatgccccggctccatctggccaccgaaaggttgctccttaacacaggctaaggaccagcttttttgggagagaacagacgcaggggcgggagggaaaaagggagaggcagacgtcacttcctcttggcggctctggcagcagattggtcagttgagtggcagaaaagcagacggggactgggcaaggcactgtcggtgacatcacggacagggcgacttctatgtagatgaggcagcgcagaggctgctgcttcgccacttgctgcttcgccacgaaggagttcccctgccctgggagcgggttcaggaccgcggatcggaagagagaatcccagctgtgtgtcagggctggaaagggctcgggagtgcgcggggcaagtgaccgtgtgtgtaaagagtgaggcgtatgaggctgtgtcggggcagagcccgaagatctcaatgatagggacttagggtgatagaagtgcaaagcatgactgtcaaatttttggagcaggttttctgacttcggtcggaaaacccctatatgtggtaatccaacaatagaaattatttttaagtttgtgtgttcctttttctgttcaatggtgcttttgatattgttgtaaagcagtgactagcagattctgtgtggtaaaagcactgaaccctgtttagttcttttctccctaccttattggtaattatttctgtgtatatatgttccaaagaaatgcggcttgtatattcatgcttttcaactttttgtgatagacagttgatacacaagtagtacctcctccgggatcttcttagtcaagactgtttggtagatgcatgttttttgttacttgtaatgtacagtattcagttcattttctttttgcagcactgtccggttgaaacacaacgcgaggatcgggcgtggtggctcacgcctgtaatcccagcactttgggaggccgaggcaggacaatcaagaccaatcctggtcatcaaggcaggagaatcaagaccatcgaggtcaggagatcaagaccatcct

SEQ ID NO: 399 - DNA, 1085 bp, synthetic construct
  source 1..1085: mol_type = other DNA
gtttcttctgtaatccgaaacattctagtctgcgaattaaaagccattatttgaagaaggatgccccggctccatctggccaccgaaaggttgctccttaacacaggctaaggaccagcttttttgggagagaacagacgcaggggcgggagggaaaaagggagaggcagacgtcacttcctcttggcggctctggcagcagattggtcagttgagtggcagaaaagcagacggggactgggcaaggcactgtcggtgacatcacggacagggcgacttctatgtagatgaggcagcgcagaggctgctgcttcgccacttgctgcttcgccacgaaggagttcccctgccctgggagcgggttcaggaccgcggatcggaagagagaatcccagctgtgtgtcagggctggaaagggctcgggagtgcgcggggcaagtgaccgtgtgtgtaaagagtgaggcgtatgaggctgtgtcggggcagagcccgaagatctcaatgatagggacttagggtgatagaagtgcaaagcatgactgtcaaatttttggagcaggttttctgacttcggtcggaaaacccctacatcaggttgtttttctgtttttacatcaggttgtttttctgtttggttttttttttacaccacgtttatacgccggtgcacggtttaccactgaaaacacctttcatctacaggtgatatcttttaacacaaataaaatgtagtagtcctaggagacggaatagaaggaggtggggcctaggcagattcatctctgcggtgcattttgcctctggccctcgggccctagtttgcgatctttcccatcttgcctctgcttccctctgcacaatcctgagtattgcagtaccttacacttaaggaaatttcgtcttgccaaagttgatccatttcagctccgaaacataacaggaactagtgcaacgataaacgtatgaggaacttgcaataagagtgacagaatcctttgaatcaaaaaaaaaaaaagccaccacttaatgagtatctaccatatgtcaagggcttcaccaatatttcattgaaatattccagacca

SEQ ID NO: 400 - DNA, 1087 bp, synthetic construct
  source 1..1087: mol_type = other DNA
gtttcttctgtaatccgaaacattctagtctgcgaattaaaagccattatttgaagaaggatgccccggctccatctggccaccgaaaggttgctccttaacacaggctaaggaccagcttttttgggagagaacagacgcaggggcgggagggaaaaagggagaggcagacgtcacttcctcttggcggctctggcagcagattggtcagttgagtggcagaaaagcagacggggactgggcaaggcactgtcggtgacatcacggacagggcgacttctatgtagatgaggcagcgcagaggctgctgcttcgccacttgctgcttcgccacgaaggagttcccctgccctgggagcgggttcaggaccgcggatcggaagagagaatcccagctgtgtgtcagggctggaaagggctcgggagtgcgcggggcaagtgaccgtgtgtgtaaagagtgaggcgtatgaggctgtgtcggggcagagcccgaagatctcaatgatagggacttagggtgatagaagtgcaaagcatgactgtcaaatttttggagcaggttttctgacttcggtcggaaaacccctcttatgatgtttgttgccaatgatagattgttttcactgtgcaaaaattatgggtagttttggtggtcttgatgcagttgtaagcttggggtatgaaggtttgggccacgcctgggcgcttccggctgcgccggatgctgtttcctttccgctcccaggggcgttgggaacggttgtaggacgtggctctttattcgtgagttttccatttacctccgctgaacctagagcttcagacgccctatggcgtccgcctcgacccaaccggcggccttgagcgctgagcaagcaaagggtgagaatcgtcctagtcaaggcataggctgctggcctggggtagtcaaggcatgggctgctggtctggggaggatgcgggcggaggatgtggggcgacaaacctggctacgtccgccgggaaaatggggtaggggacgccgggtaccgtccttctaagtggggcgcttgcccccaagacttgggatcttattgggttacctaca

SEQ ID NO: 401 - DNA, 1085 bp, synthetic construct
  source 1..1085: mol_type = other DNA
gtttcttctgtaatccgaaacattctagtctgcgaattaaaagccattatttgaagaaggatgccccggctccatctggccaccgaaaggttgctccttaacacaggctaaggaccagcttttttgggagagaacagacgcaggggcgggagggaaaaagggagaggcagacgtcacttcctcttggcggctctggcagcagattggtcagttgagtggcagaaaagcagacggggactgggcaaggcactgtcggtgacatcacggacagggcgacttctatgtagatgaggcagcgcagaggctgctgcttcgccacttgctgcttcgccacgaaggagttcccctgccctgggagcgggttcaggaccgcggatcggaagagagaatcccagctgtgtgtcagggctggaaagggctcgggagtgcgcggggcaagtgaccgtgtgtgtaaagagtgaggcgtatgaggctgtgtcggggcagagcccgaagatctcaatgatagggacttagggtgatagaagtgcaaagcatgactgtcaaatttttggagcaggttttctgacttcggtcggaaaaccccttctttactgttatatgttaggcgaaatattacgcgtttggagtaagtggtgctttttgtaactgaaaagagattctgtgtgtgtttttttttttttagaggctgcatagttatttgtatgaaccgcaggtgacctaattagcaaggtaattcagacctgtatcctagcacttaagaagtggaagtgggataaccctgcgtgttctcgtgtgggaggctagcttaagcaacaaagcaggaaggccccaccaacaaaagaatttaaaaattatacgtgcgtggtggcgcgcgtatgaggaaattatttggcaactgtgttacagtatagcagcaaatggaatagacctagtccctgactttaggagacctgcctcagccccccgaatggctgggactacaggcgtgcgcctccgcgcccagctaatttttgcatttttggtagagacgggttcaccatgttggccaggatggtctccatctcttcatctggtgatccgcc

SEQ ID NO: 402 - DNA, 1087 bp, synthetic construct
  source 1..1087: mol_type = other DNA
gtttcttctgtaatccgaaacattctagtctgcgaattaaaagccattatttgaagaaggatgccccggctccatctggccaccgaaaggttgctccttaacacaggctaaggaccagcttttttgggagagaacagacgcaggggcgggagggaaaaagggagaggcagacgtcacttcctcttggcggctctggcagcagattggtcagttgagtggcagaaaagcagacggggactgggcaaggcactgtcggtgacatcacggacagggcgacttctatgtagatgaggcagcgcagaggctgctgcttcgccacttgctgcttcgccacgaaggagttcccctgccctgggagcgggttcaggaccgcggatcggaagagagaatcccagctgtgtgtcagggctggaaagggctcgggagtgcgcggggcaagtgaccgtgtgtgtaaagagtgaggcgtatgaggctgtgtcggggcagagcccgaagatctcaatgatagggacttagggtgatagaagtgcaaagcatgactgtcaaatttttggagcaggttttctgacttcggtcggaaaacccctaccttattcacgcctaaaaagtagactgactgtggggtggtcgtgttttttgtttcttgttggtaggtggtgaatgcgtttttttcgttgttttctccgttactcaggctgccagttgcttggcagtcttgtcgctggctgtggacgctctgcacttcatcaccgtccccagctgcgctttgagccggtctaaggttgcccacagtattgacgttgggacccacgaaactggcaatttccatgtgtgcggccttacccagttctcccaaacttctgcgtataaccgcttctctgtgcttcagaaagataagtccggccccggcctcacacagcagctcagttcgtgacagcgtttaatatgtaaaatggagcaaataatttatagggcgttgggagagttaaagagactaattcatttacgtgttaaatacagggaatggcttttgcattgatataaccccagcctccagcatgcgccagacctgacgtaggtgttcggc

SEQ ID NO: 403 - DNA, 1087 bp, synthetic construct
  source 1..1087: mol_type = other DNA
gtttcttctgtaatccgaaacattctagtctgcgaattaaaagccattatttgaagaaggatgccccggctccatctggccaccgaaaggttgctccttaacacaggctaaggaccagcttttttgggagagaacagacgcaggggcgggagggaaaaagggagaggcagacgtcacttcctcttggcggctctggcagcagattggtcagttgagtggcagaaaagcagacggggactgggcaaggcactgtcggtgacatcacggacagggcgacttctatgtagatgaggcagcgcagaggctgctgcttcgccacttgctgcttcgccacgaaggagttcccctgccctgggagcgggttcaggaccgcggatcggaagagagaatcccagctgtgtgtcagggctggaaagggctcgggagtgcgcggggcaagtgaccgtgtgtgtaaagagtgaggcgtatgaggctgtgtcggggcagagcccgaagatctcaatgatagggacttagggtgatagaagtgcaaagcatgactgtcaaatttttggagcaggttttctgacttcggtcggaaaaccccttttgacccattacccatctaagttagatgcttttttaaatgttttttaatttttaaatttttaatttttttcattatttattttttatttttgagacggatctcggctcactgtaacctccacctcccgggttcaagcgattctcctgactcagcctcccgagtagctgggattacaggcgcgcgccaccatgcccggctaatttttctatttttagtaaagacggggtttcgccatgttgaccagggtggtcttgaactcctgacgtcaggtgatcctcctgcctcgtgctgggattgcaggcgtgagccaccgctcccggcccttagatgctttttaatcagcaagtacgcaatgctttcctgacaggaatgtcaagtccgtcaggaaatccacataagggtgttaagcaggcaaagtaccacatacagattaaaatcaaaagcactgtcaacgcttatttaatttatacagtagaccctaacttttctaattttgtg

SEQ ID NO: 404 - DNA, 1087 bp, synthetic construct
  source 1..1087: mol_type = other DNA
gtttcttctgtaatccgaaacattctagtctgcgaattaaaagccattatttgaagaaggatgccccggctccatctggccaccgaaaggttgctccttaacacaggctaaggaccagcttttttgggagagaacagacgcaggggcgggagggaaaaagggagaggcagacgtcacttcctcttggcggctctggcagcagattggtcagttgagtggcagaaaagcagacggggactgggcaaggcactgtcggtgacatcacggacagggcgacttctatgtagatgaggcagcgcagaggctgctgcttcgccacttgctgcttcgccacgaaggagttcccctgccctgggagcgggttcaggaccgcggatcggaagagagaatcccagctgtgtgtcagggctggaaagggctcgggagtgcgcggggcaagtgaccgtgtgtgtaaagagtgaggcgtatgaggctgtgtcggggcagagcccgaagatctcaatgatagggacttagggtgatagaagtgcaaagcatgactgtcaaatttttggagcaggttttctgacttcggtcggaaaacccctgtttacttggttttaaaaatagcttgcactagcgataccgcgaatatggttattaggtttgttaggcacagtcgtgtcttactatagaaaaataacgtagtgttcattttgctgcctgtatgtgttaatttgtccttattgcgccattgttcttgttaagtcttctgtaaggagttgcgggtttcaaactgtcagtctgagagcataagctcacttttcagtcagttgaattgaatgttacattcgattggttctggatattgatattacccaaggcttgtcctgtttgtaagtcttttcctacacctgacaatatgattatgtttacaatgtccctagaactctgggtgtatcgttcccactgaataaaatttgatctctaagttgacctataaatttaagtaccaaaaaactggtttgtaagattttggaaggcagaggcagggaagagaccaacgtggtctacatataaagtaccaggtacatataaagtaccaggt

SEQ ID NO: 405 - DNA, 1083 bp, synthetic construct
  source 1..1083: mol_type = other DNA
gtttcttctgtaatccgaaacattctagtctgcgaattaaaagccattatttgaagaaggatgccccggctccatctggccaccgaaaggttgctccttaacacaggctaaggaccagcttttttgggagagaacagacgcaggggcgggagggaaaaagggagaggcagacgtcacttcctcttggcggctctggcagcagattggtcagttgagtggcagaaaagcagacggggactgggcaaggcactgtcggtgacatcacggacagggcgacttctatgtagatgaggcagcgcagaggctgctgcttcgccacttgctgcttcgccacgaaggagttcccctgccctgggagcgggttcaggaccgcggatcggaagagagaatcccagctgtgtgtcagggctggaaagggctcgggagtgcgcggggcaagtgaccgtgtgtgtaaagagtgaggcgtatgaggctgtgtcggggcagagcccgaagatctcaatgatagggacttagggtgatagaagtgcaaagcatgactgtcaaatttttggagcaggttttctgacttcggtcggaaaacccctatttttgtggtgctaaaagttagattgcattccgcccttctcacgtctctttacgtgttgtttgcgaggcgtggcctcggaggtaaatggtctccttttacctcagataagcttacctttgctctgtgagtaagaatgtagctacacttccaaatttagctattgtcctttgcggtccaaatgaaaatattaccttccgatctaacaatgttaaactagtcccaggcccttctatcgattgccagaatagactagactactacacagacacaccctctcaaatcaggccagctcctgcaacctgcacctacagtttgtcccctgggacaaatgaaaggacaggccctctttcccccccccccccaaatcagagcacacacagatcttggggtctggggcagaaatttcgttcatggaaaaaacaaacaaacaaacaaacacgatcaaaggaagctcgttccctttggcctcagggtttcttagacgccgtgttccc

SEQ ID NO: 406 - DNA, 1084 bp, synthetic construct
  source 1..1084: mol_type = other DNA
gtttcttctgtaatccgaaacattctagtctgcgaattaaaagccattatttgaagaaggatgccccggctccatctggccaccgaaaggttgctccttaacacaggctaaggaccagcttttttgggagagaacagacgcaggggcgggagggaaaaagggagaggcagacgtcacttcctcttggcggctctggcagcagattggtcagttgagtggcagaaaagcagacggggactgggcaaggcactgtcggtgacatcacggacagggcgacttctatgtagatgaggcagcgcagaggctgctgcttcgccacttgctgcttcgccacgaaggagttcccctgccctgggagcgggttcaggaccgcggatcggaagagagaatcccagctgtgtgtcagggctggaaagggctcgggagtgcgcggggcaagtgaccgtgtgtgtaaagagtgaggcgtatgaggctgtgtcggggcagagcccgaagatctcaatgatagggacttagggtgatagaagtgcaaagcatgactgtcaaatttttggagcaggttttctgacttcggtcggaaaacccctataactggtaaccaaaagcagattactttcccccttgtggtcttcgcgtttgcggacgggagagaactttcggccattttccttttagaaatttaacttcttgaaggccaccaggtgacccttacttccctctcacctttccttctacctgtactttctctattaaaaagcctgcagaagtacccttgacaaattgccaaaaatgacacctaaaaaaaaaaaaaggaaaaacgacaccttaggtaattataggttgtaagaaaaagatttgacctcttggagtttttatttcttaataccaaaggacacccaaggaacgtatctctcaaaattgggtttcaaacctcagccgtttccttcttagttccagtgcttaacacgcaacagacctgcacaccactacactgcatacgagttttaaagttaataaatcagtcacccctccatagtcttctacctacttgaagacagaaacggctgctaggaagcaattcttc

SEQ ID NO: 407 - DNA, 1087 bp, synthetic construct
  source 1..1087: mol_type = other DNA
gtttcttctgtaatccgaaacattctagtctgcgaattaaaagccattatttgaagaaggatgccccggctccatctggccaccgaaaggttgctccttaacacaggctaaggaccagcttttttgggagagaacagacgcaggggcgggagggaaaaagggagaggcagacgtcacttcctcttggcggctctggcagcagattggtcagttgagtggcagaaaagcagacggggactgggcaaggcactgtcggtgacatcacggacagggcgacttctatgtagatgaggcagcgcagaggctgctgcttcgccacttgctgcttcgccacgaaggagttcccctgccctgggagcgggttcaggaccgcggatcggaagagagaatcccagctgtgtgtcagggctggaaagggctcgggagtgcgcggggcaagtgaccgtgtgtgtaaagagtgaggcgtatgaggctgtgtcggggcagagcccgaagatctcaatgatagggacttagggtgatagaagtgcaaagcatgactgtcaaatttttggagcaggttttctgacttcggtcggaaaacccctctggggaataagagtggtttaaagaaagaacaatttgagagatctgcttagatctaataaaacccaagtatagtttctttagacgtcttatatctcacgtaggacctcttatttcagactcactgcaagaacaagctaaagaactatatacagtcaggaacaaggtgagccatcgcggttctcagtcccatgatcttaagagtttttcctcttcccctcttccctggctgtcctggagctcactctgtagaccaggctggtctcaaactcagaaatccacttacctctgcctcccaagggctgggattaaaggcatgcaccaccattgcccggcagggtatgtggactatgctgtccttcaactcagagatcgtggtactttaaatctcattttccgaaagaaaagaaaagaaaggaaggggggaaataaagccagtatattttgcacccacaatctgaagttctacaaatattgttagaaaatgcaaaggacccaagtc

SEQ ID NO: 408 - DNA, 1087 bp, synthetic construct
  source 1..1087: mol_type = other DNA
gtttcttctgtaatccgaaacattctagtctgcgaattaaaagccattatttgaagaaggatgccccggctccatctggccaccgaaaggttgctccttaacacaggctaaggaccagcttttttgggagagaacagacgcaggggcgggagggaaaaagggagaggcagacgtcacttcctcttggcggctctggcagcagattggtcagttgagtggcagaaaagcagacggggactgggcaaggcactgtcggtgacatcacggacagggcgacttctatgtagatgaggcagcgcagaggctgctgcttcgccacttgctgcttcgccacgaaggagttcccctgccctgggagcgggttcaggaccgcggatcggaagagagaatcccagctgtgtgtcagggctggaaagggctcgggagtgcgcggggcaagtgaccgtgtgtgtaaagagtgaggcgtatgaggctgtgtcggggcagagcccgaagatctcaatgatagggacttagggtgatagaagtgcaaagcatgactgtcaaatttttggagcaggttttctgacttcggtcggaaaacccctctcggtttatcttaaagggttttaaatatagaaagcttccttagtcttatgggtgagagtgctgtttaagccttacctaggtatgtctttgaacatttattacagattgttatttgtgactatgaccactcaggtgttctgttcttgtgaatttagacacactcagaaaggctacacactcaaagaccacaccaaagtgaagtactatctgggccgtgaaactggtcacatatcagttattttgcagtaaaacaaggaagtcaatcatactgcttcagtgggtcagggagtcaagaatgcacagtacaagagctggtgagattcctcagcaggtaagagcactgaatgctcttccaaagattctgagttcaaatcccagcaaccacgtggtggatttgaacaaaggatgaaaacaaccatccataaccagatctgatgccctcttctggagtgtcaaaagacagctatggtgtacttacataaataaataagtaaaaaca

SEQ ID NO: 409 - DNA, 1087 bp, synthetic construct
  source 1..1087: mol_type = other DNA
gtttcttctgtaatccgaaacattctagtctgcgaattaaaagccattatttgaagaaggatgccccggctccatctggccaccgaaaggttgctccttaacacaggctaaggaccagcttttttgggagagaacagacgcaggggcgggagggaaaaagggagaggcagacgtcacttcctcttggcggctctggcagcagattggtcagttgagtggcagaaaagcagacggggactgggcaaggcactgtcggtgacatcacggacagggcgacttctatgtagatgaggcagcgcagaggctgctgcttcgccacttgctgcttcgccacgaaggagttcccctgccctgggagcgggttcaggaccgcggatcggaagagagaatcccagctgtgtgtcagggctggaaagggctcgggagtgcgcggggcaagtgaccgtgtgtgtaaagagtgaggcgtatgaggctgtgtcggggcagagcccgaagatctcaatgatagggacttagggtgatagaagtgcaaagcatgactgtcaaatttttggagcaggttttctgacttcggtcggaaaacccctccacattttgtgtttaaaaatagaaatatttaagtgagatcagtttaaatctgctttatctagggtgtctaactgcttgcatctttttaacttttccttatttgtgagaaggtctgtaaaacttattatatgttagtacactgtagctgtcttcagacactccagaagagggattcagatcaccttacagatggttttgagccaccatgtggttgctgggatttgaactcaggacctttagaaaagtagttgggtgctcttacccgctgagccatctcaccagccctttttttttcttttttccagttcgggtttctctgtgtgtagccctggctgtcctggaactcattctgtagaccgggctggcctcgaactcagaaatctgcctgcctctgcctcccaagtgctgggattaaaggaatgtgccttcattgcccggctctagggctttttgttgttgtttgtttgtttgtttgtttgtttgcttttgtggatggcct

SEQ ID NO: 410 - DNA, 1087 bp, synthetic construct
  source 1..1087: mol_type = other DNA
gtttcttctgtaatccgaaacattctagtctgcgaattaaaagccattatttgaagaaggatgccccggctccatctggccaccgaaaggttgctccttaacacaggctaaggaccagcttttttgggagagaacagacgcaggggcgggagggaaaaagggagaggcagacgtcacttcctcttggcggctctggcagcagattggtcagttgagtggcagaaaagcagacggggactgggcaaggcactgtcggtgacatcacggacagggcgacttctatgtagatgaggcagcgcagaggctgctgcttcgccacttgctgcttcgccacgaaggagttcccctgccctgggagcgggttcaggaccgcggatcggaagagagaatcccagctgtgtgtcagggctggaaagggctcgggagtgcgcggggcaagtgaccgtgtgtgtaaagagtgaggcgtatgaggctgtgtcggggcagagcccgaagatctcaatgatagggacttagggtgatagaagtgcaaagcatgactgtcaaatttttggagcaggttttctgacttcggtcggaaaacccctaaaaccagtaagggagaaaggtcaagtaacatataaaggaaggcctatcagaattacaccagacttttcaccagagactatgaaagccagaagagcctggacagatgttatacagacactaagagaacacaaatgccagcccaggctactatacctggccaaactctcaattaccatagatggagaaaccaaagtattccacgacaaaaacaaattcacacaatatctttccacgaatccagcccttcaaaggataatgacagaaaagaagcaatacaaggacggaaatcacgccctagaacaaccaagaaactaatcattcaacaaaccaaaaagaagacagccacaagaacagaatgccaactctaacaacaaaaataaaaggaagcaacaattacttttccttaatatctcttaatatcaatggactcaattccccaataaaaagacatagactaacagactggctacacaaacaggacccaacattctgctgctta

SEQ ID NO: 411 - DNA, 1087 bp, synthetic construct
  source 1..1087: mol_type = other DNA
gtttcttctgtaatccgaaacattctagtctgcgaattaaaagccattatttgaagaaggatgccccggctccatctggccaccgaaaggttgctccttaacacaggctaaggaccagcttttttgggagagaacagacgcaggggcgggagggaaaaagggagaggcagacgtcacttcctcttggcggctctggcagcagattggtcagttgagtggcagaaaagcagacggggactgggcaaggcactgtcggtgacatcacggacagggcgacttctatgtagatgaggcagcgcagaggctgctgcttcgccacttgctgcttcgccacgaaggagttcccctgccctgggagcgggttcaggaccgcggatcggaagagagaatcccagctgtgtgtcagggctggaaagggctcgggagtgcgcggggcaagtgaccgtgtgtgtaaagagtgaggcgtatgaggctgtgtcggggcagagcccgaagatctcaatgatagggacttagggtgatagaagtgcaaagcatgactgtcaaatttttggagcaggttttctgacttcggtcggaaaacccctcccaatttcactggtctacaatgaaagcaaaacagttctcttccccgctccccggtgtgtgagaggggctttgatccttctctggtttcctaggaaacgcgtatgtgctagagccacgctctgagacttccgcctcgtgcggtcccgcttcctttctgcctcctctggcctgcatccgtgggggaggtggctggctgcagggttctccggatctcttctgtgttcccactactcaagcaccgagtggcgttctatggcgtccgcctcggctcagcccgcggccctgagcgcggagcaggccaagggtgaggaaagagcctagtctgggtgtgggccgtcttctggggggagggcgcgatactattctttgcctctccaagtggggcccttgcccattagggcgaagggttgggaggacaagcttatcgggttgcttgcaggcctcggcccactaattccctgcctcttccctcctctgggctcgcccgccgtcctccgcg

SEQ ID NO: 412 - DNA, 1087 bp, synthetic construct
  source 1..1087: mol_type = other DNA
gtttcttctgtaatccgaaacattctagtctgcgaattaaaagccattatttgaagaaggatgccccggctccatctggccaccgaaaggttgctccttaacacaggctaaggaccagcttttttgggagagaacagacgcaggggcgggagggaaaaagggagaggcagacgtcacttcctcttggcggctctggcagcagattggtcagttgagtggcagaaaagcagacggggactgggcaaggcactgtcggtgacatcacggacagggcgacttctatgtagatgaggcagcgcagaggctgctgcttcgccacttgctgcttcgccacgaaggagttcccctgccctgggagcgggttcaggaccgcggatcggaagagagaatcccagctgtgtgtcagggctggaaagggctcgggagtgcgcggggcaagtgaccgtgtgtgtaaagagtgaggcgtatgaggctgtgtcggggcagagcccgaagatctcaatgatagggacttagggtgatagaagtgcaaagcatgactgtcaaatttttggagcaggttttctgacttcggtcggaaaacccctgaatttgttaaattacaggaggaagcttttttagttcattttacaaatactttcttgttaggtagataataccttctaaggttattatctggatcttctaagtctttttatcgctagcaagtctaagtttctggactttggaattagaagttaatgtcgtaggcgggcatggtggtccacgcctttaatcccagagtttgggaggcagacgcaggtggttttctgagttcgaggccatcctgctcttcaatgttagttccaggacagccagggttatacaaagaaaccctgtctcgagaaacaaaacaaacaaaaaaagagtagctgagtgctctgagttgtctctccagccccttagctatttattttcatttaaattatttttgttttattcgcttgtgtgcctgagtttgaatttcccgggattaacagttgaagactagggctggtgagatggctcagcggttaagattgccgactgctcttccaaaggtcctgag

SEQ ID NO: 413 - DNA, 1087 bp, synthetic construct
  source 1..1087: mol_type = other DNA
gtttcttctgtaatccgaaacattctagtctgcgaattaaaagccattatttgaagaaggatgccccggctccatctggccaccgaaaggttgctccttaacacaggctaaggaccagcttttttgggagagaacagacgcaggggcgggagggaaaaagggagaggcagacgtcacttcctcttggcggctctggcagcagattggtcagttgagtggcagaaaagcagacggggactgggcaaggcactgtcggtgacatcacggacagggcgacttctatgtagatgaggcagcgcagaggctgctgcttcgccacttgctgcttcgccacgaaggagttcccctgccctgggagcgggttcaggaccgcggatcggaagagagaatcccagctgtgtgtcagggctggaaagggctcgggagtgcgcggggcaagtgaccgtgtgtgtaaagagtgaggcgtatgaggctgtgtcggggcagagcccgaagatctcaatgatagggacttagggtgatagaagtgcaaagcatgactgtcaaatttttggagcaggttttctgacttcggtcggaaaacccctaccccctaattctacaagaatagaaagcttagcagctcctctgaatggttgctctcaggtgctagtggttgcaagtcgtatgttgatgcctgcctttgccctacctggtgtgtgagcgtgagcgcgccccacctctccagcctctctcttactgtttttcagacaagatgggactgttgttctcctactgctatgtacctcaatttcaattgatcatgcctggacataactgcccatgttgtaaggtcgtctacgttgtaaggtcgtgctcagtttctgatgcctagactagtcacctttccgtttgcctcctgactgtgtaaatgaggcaaatgaaggtggtctcttaactgacatgttagtgtttgacctatgggatagtttctcattgttgagacagaatttctagaagctggtccgctgagcggctaagagcacttgctgatattgcaaaggatctacctgggtttggttctcagcactcacatggaagttcacat

SEQ ID NO: 414 - DNA, 654 bp, synthetic construct
  source 1..654: mol_type = other DNA
gtttcttctgtaatccgaaacattctagtctgcgaattaaaagccattatttgaagaaggatgccccggctccatctggccaccgaaaggttgctccttaacacaggctaaggaccagcttttttgggagagaacagacgcaggggcgggagggaaaaagggagaggcagacgtcacttcctcttggcggctctggcagcagattggtcagttgagtggcagaaaagcagacggggactgggcaaggcactgtcggtgacatcacggacagggcgacttctatgtagatgaggcagcgcagaggctgctgcttcgccacttgctgcttcgccacgaaggagttcccctgccctgggagcgggttcaggaccgcggatcggaagagagaatcccagctgtgtgtcagggctggaaagggctcgggagtgcgcggggcaagtgaccgtgtgtgtaaagagtgaggcgtatgaggctgtgtcggggcagagcccgaagatctcaatgatagggacttagggtgatagaagtgcaaagcatgactgtcaaatttttggagcaggttttctgacttcggtcggaaaaccccttgtagttcctgcaatttaattttcgtttaaaactttattttattctttaacttaaaaaaaatatata

SEQ ID NO: 415 - DNA, 1087 bp, synthetic construct
  source 1..1087: mol_type = other DNA
gtttcttttgtaatccgaaacattctagtctgcgaattaaaagccattatttgaagaaggatgccccggctccatctggccaccgaaaggttgctccttaacacaggctaaggaccagcttctttgggagagaacagacgcaggggcgggagggaaaaagggagaggcagacgtcacttccccttggcggctctggcagcagattggtcggttgagtggcagaaaggcagacggggactgggcaaggcactgtcggtgacatcacggacagggcgacttctatgtagatgaggcagcgcagaggctgctgcttcgccacttgctgcttcgccacgaaggagttcccgtgccctgggagcgggttcaggaccgcggatcggaagtgagaatcccagctgtgtgtcagggctggaaagggctcgggagtgcgcggggcaagtgaccgtgtgtgtaaagagtgaggcgtatgaggctgtgtcggggcagagcccgaagatctcaatgatagggacttagggtgatagaagtgcaaagcatgactgtcaaatttttggagcaggttttctgacttcggtcggaaaacccctactttctggagtttcaaaaacagactgtacgccaagggtcatatctttttttgtattggtttgtgtcttggttggtgtcttaggtgttaatcctacagtggagggtttatgggaataggaagtaacatgtcgcctgcatgtcataggagaaaaagcgagcatcagccgtatcggctttgtaacacaaattagctatcgtgaagtccgctcagctcttccctttctaccctggctgctttttgcagggattggtccgtggtctccagtctcttgggttctcaccctgtgtgaaaatcttcgtgtttttccctaccccccagtcacctcttacacagcctctgcttccaagcgcagcccccacaggagtttgtaggatttctgtgctagcggggaatgtgttctcacctcatagagccaggtagaaattatgcagatgggcagttctctgggaagaaagcagggcctttggggctctcagtgtccccgttgggttgtagaca

SEQ ID NO: 416 - DNA, 1087 bp, synthetic construct
  source 1..1087: mol_type = other DNA
gtttcttttgtaatccgaaacattctagtctgcgaattaaaagccattatttgaagaaggatgccccggctccatctggccaccgaaaggttgctccttaacacaggctaaggaccagcttctttgggagagaacagacgcaggggcgggagggaaaaagggagaggcagacgtcacttccccttggcggctctggcagcagattggtcggttgagtggcagaaaggcagacggggactgggcaaggcactgtcggtgacatcacggacagggcgacttctatgtagatgaggcagcgcagaggctgctgcttcgccacttgctgcttcgccacgaaggagttcccgtgccctgggagcgggttcaggaccgcggatcggaagtgagaatcccagctgtgtgtcagggctggaaagggctcgggagtgcgcggggcaagtgaccgtgtgtgtaaagagtgaggcgtatgaggctgtgtcggggcagagcccgaagatctcaatgatagggacttagggtgatagaagtgcaaagcatgactgtcaaatttttggagcaggttttctgacttcggtcggaaaacccctactttctggagtttctaaaagtagactgtacgctaagggtcatatctttttttgttttggtttgtgtcttggttggcgtcttaaatgttaatcctacagtggagggctggcgaataggaagtaacatgtcgcctgcacgccataggagaaaaagcgagcatcagccgtatcggctttgtaacacaaattagctatcgtgaagtccgctcagctcttccctttctaccctggctgctttttgcagggattggtccgtggtctccagtctcttgggttctcaccctgtgtgaaaatcttcctgtttttccctaccccccaagtcacctcttacacagcctctgcttccaagcgcagcccccacaggagtttgtaggatttctgtgctagcggggagtgtgttctcacctcatagagccaggtagaaactacgcagatgggtgctgttctccaggaagaaagcagggcctttggggctctcagtgtccccgttgggttgtaga

SEQ ID NO: 417 - DNA, 1087 bp, synthetic construct
  source 1..1087: mol_type = other DNA
gtttcttttgtaatccgaaacattctagtctgcgaattaaaagccattatttgaagaaggatgccccggctccatctggccaccgaaaggttgctccttaacacaggctaaggaccagcttctttgggagagaacagacgcaggggcgggagggaaaaagggagaggcagacgtcacttccccttggcggctctggcagcagattggtcggttgagtggcagaaaggcagacggggactgggcaaggcactgtcggtgacatcacggacagggcgacttctatgtagatgaggcagcgcagaggctgctgcttcgccacttgctgcttcgccacgaaggagttcccgtgccctgggagcgggttcaggaccgcggatcggaagtgagaatcccagctgtgtgtcagggctggaaagggctcgggagtgcgcggggcaagtgaccgtgtgtgtaaagagtgaggcgtatgaggctgtgtcggggcagagcccgaagatctcaatgatagggacttagggtgatagaagtgcaaagcatgactgtcaaatttttggagcaggttttctgacttcggtcggaaaacccctactttctggagtttcaaaaacagaccgtacgccaagggtcatgtcttttttcgtattggtttgtgtcttagttgttaatcctacagtggaggcctggggaataagaagtaacatgtggcctgcacgccataggagaaaaagcgagcatcagccgtatcggctttgtaacacaaattagctatcgtgaagtccgctcagctcttccatttctaccctggctgctttttgcagggattggtccgtggtctccagtctcttgggttctcaccctgtgtgaaaatcttcgtgtttttccctaccccccaagtcacctcttacacagcctctgcttccaagcgcagcccccacaggagtttgtaggatttctgtgctagcggggagtgtgttctcacctcatagagccaggtagaaattatgcagatgggcgctgttctctgggaagaaagcagggcctttggggctctcagtgtccccgttgggttgtagacataacactctta

SEQ ID NO: 418 - DNA, 891 bp, synthetic construct
  source 1..891: mol_type = other DNA
gtttcttttgtaatccgaaacattctagtctgcgaattaaaagccattatttgaagaaggatgccccggctccatctggccaccgaaaggttgctccttaacacaggctaaggaccagcttctttgggagagaacagacgcaggggcgggagggaaaaagggagaggcagacgtcacttccccttggcggctctggcagcagattggtcggttgagtggcagaaaggcagacggggactgggcaaggcactgtcggtgacatcacggacagggcgacttctatgtagatgaggcagcgcagaggctgctgcttcgccacttgctgcttcgccacgaaggagttcccgtgccctgggagcgggttcaggaccgcggatcggaagtgagaatcccagctgtgtgtcagggctggaaagggctcgggagtgcgcggggcaagtgaccgtgtgtgtaaagagtgaggcgtatgaggctgtgtcggggcagagcccgaagatctcaatgatagggacttagggtgatagaagtgcaaagcatgactgtcaaatttttggagcaggttttctgacttcggtcggaaaacccctcctccggggatacaacgtgtttcctaaaagtagagggaggtaagagacggtagcacctgcggggcggcttgcacgccgagtgcctgtgacgcgccggcttaacttaactgcttccctgaagtaccttgaggttcctgatgtgcgggcggtagacggtaggcttatgcggcacgctgtcgtttccaccgtggctactgcgctttgggaaggccacgacctcctcctttggggaggtccttaggatctcagcttggcagtcgagtgggtggcgaccttttaaaggaatgggacccacccggagttc

SEQ ID NO: 419 - DNA, 1079 bp, synthetic construct
  source 1..1079: mol_type = other DNA
gtttcttttgtaatccgaaacattctagtctgcgaattaaaagccattatttgaagaaggatgccccggctccatctggccaccgaaaggttgctccttaacacaggctaaggaccagcttctttgggagagaacagacgcaggggcgggagggaaaaagggagaggcagacgtcacttccccttggcggctctggcagcagattggtcggttgagtggcagaaaggcagacggggactgggcaaggcactgtcggtgacatcacggacagggcgacttctatgtagatgaggcagcgcagaggctgctgcttcgccacttgctgcttcgccacgaaggagttcccgtgccctgggagcgggttcaggaccgcggatcggaagtgagaatcccagctgtgtgtcagggctggaaagggctcgggagtgcgcggggcaagtgaccgtgtgtgtaaagagtgaggcgtatgaggctgtgtcggggcagagcccgaagatctcaatgatagggacttagggtgatagaagtgcaaagcatgactgtcaaatttttggagcaggttttctgacttcggtcggaaaacccctttcccttcttgtaatacaaaataataacaaccacagaggacatcgcaagtaaaatgtgtataacaaccccatctaaagaaccctatcatctttctactatctgtctacctaaatatgtatagtataaataaccctatatagcactctaagcaacttaagttaggtaacttagaaaactcttttttttttttgagactgagtctcactctgtcgcacccaggctggagtgcagtggcgtgatctcggctcactgcaacctccaccttctgggttcaagtgattctcccatctcagtctcccaagtagctgggattacaggcacgccaccatgccctgctacatttttttttttttagtagagatgaggtttcaccacattggccaggctgttctcgaactcctgacctcaggtgatccgcccaccttggcctcatgaagtgctgggattacaggtgtgagccactgtacccagccagaaaactcttaaaaaac

SEQ ID NO: 420 - DNA, 969 bp, synthetic construct
  source 1..969: mol_type = other DNA
gtttcttttgtaatccgaaacattctagtctgcgaattaaaagccattatttgaagaaggatgccccggctccatctggccaccgaaaggttgctccttaacacaggctaaggaccagcttctttgggagagaacagacgcaggggcgggagggaaaaagggagaggcagacgtcacttccccttggcggctctggcagcagattggtcggttgagtggcagaaaggcagacggggactgggcaaggcactgtcggtgacatcacggacagggcgacttctatgtagatgaggcagcgcagaggctgctgcttcgccacttgctgcttcgccacgaaggagttcccgtgccctgggagcgggttcaggaccgcggatcggaagtgagaatcccagctgtgtgtcagggctggaaagggctcgggagtgcgcggggcaagtgaccgtgtgtgtaaagagtgaggcgtatgaggctgtgtcggggcagagcccgaagatctcaatgatagggacttagggtgatagaagtgcaaagcatgactgtcaaatttttggagcaggttttctgacttcggtcggaaaacccctctgaattttcttgcagttgaacaacagaggctttttttgtgtgtgtgggggtgcttggttttgggaggttgaagagtacttgttcgcaaactctctaaatgagagatggggaagtgtcttaccagctgattcgcgagagcacctgcaagtttacctgttttagtgatttgcgtttatgaaagttggagttgctgattttgtgatctctacttttaaggtaaaagcagggcggtgttgacttttcttgccagttggctgtcctgttttctttctcgcactgttttctttttgagacgaagtctgtcgctcaggctggagtgcactggcgtgatctcggctcgctgcaaactttgccgaacccctgtttagcgatttccgtttg

SEQ ID NO: 421 - DNA, 1087 bp, synthetic construct
  source 1..1087: mol_type = other DNA
gtttcttttgtaatccgaaacattctagtctgcgaattaaaagccattatttgaagaaggatgccccggctccatctggccaccgaaaggttgctccttaacacaggctaaggaccagcttctttgggagagaacagacgcaggggcgggagggaaaaagggagaggcagacgtcacttccccttggcggctctggcagcagattggtcggttgagtggcagaaaggcagacggggactgggcaaggcactgtcggtgacatcacggacagggcgacttctatgtagatgaggcagcgcagaggctgctgcttcgccacttgctgcttcgccacgaaggagttcccgtgccctgggagcgggttcaggaccgcggatcggaagtgagaatcccagctgtgtgtcagggctggaaagggctcgggagtgcgcggggcaagtgaccgtgtgtgtaaagagtgaggcgtatgaggctgtgtcggggcagagcccgaagatctcaatgatagggacttagggtgatagaagtgcaaagcatgactgtcaaatttttggagcaggttttctgacttcggtcggaaaacccctatatgtggtaatccaacaatagaaattatttttaagtttgtgtgttcctttttctgttcaatggtgcttttgatattgttgtaaagcagtgactagcagattctgtgtggtaaaagcactgaaccctgtttagttcttttctccctaccttattggtaattatttctgtgtatatatgttccaaagaaatgcggcttgtatattcatgcttttcaactttttgtgatagacagttgatacacaagtagtacctcctccgggatcttcttagtcaagactgtttggtagatgcatgttttttgttacttgtaatgtacagtattcagttcattttctttttgcagcactgtccggttgaaacacaacgcgaggatcgggcgtggtggctcacgcctgtaatcccagcactttgggaggccgaggcaggacaatcaagaccaatcctggtcatcaaggcaggagaatcaagaccatcgaggtcaggagatcaagaccatcct

SEQ ID NO: 422 - DNA, 1085 bp, synthetic construct
  source 1..1085: mol_type = other DNA
gtttcttttgtaatccgaaacattctagtctgcgaattaaaagccattatttgaagaaggatgccccggctccatctggccaccgaaaggttgctccttaacacaggctaaggaccagcttctttgggagagaacagacgcaggggcgggagggaaaaagggagaggcagacgtcacttccccttggcggctctggcagcagattggtcggttgagtggcagaaaggcagacggggactgggcaaggcactgtcggtgacatcacggacagggcgacttctatgtagatgaggcagcgcagaggctgctgcttcgccacttgctgcttcgccacgaaggagttcccgtgccctgggagcgggttcaggaccgcggatcggaagtgagaatcccagctgtgtgtcagggctggaaagggctcgggagtgcgcggggcaagtgaccgtgtgtgtaaagagtgaggcgtatgaggctgtgtcggggcagagcccgaagatctcaatgatagggacttagggtgatagaagtgcaaagcatgactgtcaaatttttggagcaggttttctgacttcggtcggaaaacccctacatcaggttgtttttctgtttttacatcaggttgtttttctgtttggttttttttttacaccacgtttatacgccggtgcacggtttaccactgaaaacacctttcatctacaggtgatatcttttaacacaaataaaatgtagtagtcctaggagacggaatagaaggaggtggggcctaggcagattcatctctgcggtgcattttgcctctggccctcgggccctagtttgcgatctttcccatcttgcctctgcttccctctgcacaatcctgagtattgcagtaccttacacttaaggaaatttcgtcttgccaaagttgatccatttcagctccgaaacataacaggaactagtgcaacgataaacgtatgaggaacttgcaataagagtgacagaatcctttgaatcaaaaaaaaaaaaagccaccacttaatgagtatctaccatatgtcaagggcttcaccaatatttcattgaaatattccagacca

SEQ ID NO: 423 - DNA, 1087 bp, synthetic construct
  source 1..1087: mol_type = other DNA
gtttcttttgtaatccgaaacattctagtctgcgaattaaaagccattatttgaagaaggatgccccggctccatctggccaccgaaaggttgctccttaacacaggctaaggaccagcttctttgggagagaacagacgcaggggcgggagggaaaaagggagaggcagacgtcacttccccttggcggctctggcagcagattggtcggttgagtggcagaaaggcagacggggactgggcaaggcactgtcggtgacatcacggacagggcgacttctatgtagatgaggcagcgcagaggctgctgcttcgccacttgctgcttcgccacgaaggagttcccgtgccctgggagcgggttcaggaccgcggatcggaagtgagaatcccagctgtgtgtcagggctggaaagggctcgggagtgcgcggggcaagtgaccgtgtgtgtaaagagtgaggcgtatgaggctgtgtcggggcagagcccgaagatctcaatgatagggacttagggtgatagaagtgcaaagcatgactgtcaaatttttggagcaggttttctgacttcggtcggaaaacccctcttatgatgtttgttgccaatgatagattgttttcactgtgcaaaaattatgggtagttttggtggtcttgatgcagttgtaagcttggggtatgaaggtttgggccacgcctgggcgcttccggctgcgccggatgctgtttcctttccgctcccaggggcgttgggaacggttgtaggacgtggctctttattcgtgagttttccatttacctccgctgaacctagagcttcagacgccctatggcgtccgcctcgacccaaccggcggccttgagcgctgagcaagcaaagggtgagaatcgtcctagtcaaggcataggctgctggcctggggtagtcaaggcatgggctgctggtctggggaggatgcgggcggaggatgtggggcgacaaacctggctacgtccgccgggaaaatggggtaggggacgccgggtaccgtccttctaagtggggcgcttgcccccaagacttgggatcttattgggttacctaca

SEQ ID NO: 424 - DNA, 1085 bp, synthetic construct
  source 1..1085: mol_type = other DNA
gtttcttttgtaatccgaaacattctagtctgcgaattaaaagccattatttgaagaaggatgccccggctccatctggccaccgaaaggttgctccttaacacaggctaaggaccagcttctttgggagagaacagacgcaggggcgggagggaaaaagggagaggcagacgtcacttccccttggcggctctggcagcagattggtcggttgagtggcagaaaggcagacggggactgggcaaggcactgtcggtgacatcacggacagggcgacttctatgtagatgaggcagcgcagaggctgctgcttcgccacttgctgcttcgccacgaaggagttcccgtgccctgggagcgggttcaggaccgcggatcggaagtgagaatcccagctgtgtgtcagggctggaaagggctcgggagtgcgcggggcaagtgaccgtgtgtgtaaagagtgaggcgtatgaggctgtgtcggggcagagcccgaagatctcaatgatagggacttagggtgatagaagtgcaaagcatgactgtcaaatttttggagcaggttttctgacttcggtcggaaaaccccttctttactgttatatgttaggcgaaatattacgcgtttggagtaagtggtgctttttgtaactgaaaagagattctgtgtgtgtttttttttttttagaggctgcatagttatttgtatgaaccgcaggtgacctaattagcaaggtaattcagacctgtatcctagcacttaagaagtggaagtgggataaccctgcgtgttctcgtgtgggaggctagcttaagcaacaaagcaggaaggccccaccaacaaaagaatttaaaaattatacgtgcgtggtggcgcgcgtatgaggaaattatttggcaactgtgttacagtatagcagcaaatggaatagacctagtccctgactttaggagacctgcctcagccccccgaatggctgggactacaggcgtgcgcctccgcgcccagctaatttttgcatttttggtagagacgggttcaccatgttggccaggatggtctccatctcttcatctggtgatccgcc

SEQ ID NO: 425 - DNA, 1087 bp, synthetic construct
  source 1..1087: mol_type = other DNA
gtttcttttgtaatccgaaacattctagtctgcgaattaaaagccattatttgaagaaggatgccccggctccatctggccaccgaaaggttgctccttaacacaggctaaggaccagcttctttgggagagaacagacgcaggggcgggagggaaaaagggagaggcagacgtcacttccccttggcggctctggcagcagattggtcggttgagtggcagaaaggcagacggggactgggcaaggcactgtcggtgacatcacggacagggcgacttctatgtagatgaggcagcgcagaggctgctgcttcgccacttgctgcttcgccacgaaggagttcccgtgccctgggagcgggttcaggaccgcggatcggaagtgagaatcccagctgtgtgtcagggctggaaagggctcgggagtgcgcggggcaagtgaccgtgtgtgtaaagagtgaggcgtatgaggctgtgtcggggcagagcccgaagatctcaatgatagggacttagggtgatagaagtgcaaagcatgactgtcaaatttttggagcaggttttctgacttcggtcggaaaacccctaccttattcacgcctaaaaagtagactgactgtggggtggtcgtgttttttgtttcttgttggtaggtggtgaatgcgtttttttcgttgttttctccgttactcaggctgccagttgcttggcagtcttgtcgctggctgtggacgctctgcacttcatcaccgtccccagctgcgctttgagccggtctaaggttgcccacagtattgacgttgggacccacgaaactggcaatttccatgtgtgcggccttacccagttctcccaaacttctgcgtataaccgcttctctgtgcttcagaaagataagtccggccccggcctcacacagcagctcagttcgtgacagcgtttaatatgtaaaatggagcaaataatttatagggcgttgggagagttaaagagactaattcatttacgtgttaaatacagggaatggcttttgcattgatataaccccagcctccagcatgcgccagacctgacgtaggtgttcggc

SEQ ID NO: 426 - DNA, 1087 bp, synthetic construct
  source 1..1087: mol_type = other DNA
gtttcttttgtaatccgaaacattctagtctgcgaattaaaagccattatttgaagaaggatgccccggctccatctggccaccgaaaggttgctccttaacacaggctaaggaccagcttctttgggagagaacagacgcaggggcgggagggaaaaagggagaggcagacgtcacttccccttggcggctctggcagcagattggtcggttgagtggcagaaaggcagacggggactgggcaaggcactgtcggtgacatcacggacagggcgacttctatgtagatgaggcagcgcagaggctgctgcttcgccacttgctgcttcgccacgaaggagttcccgtgccctgggagcgggttcaggaccgcggatcggaagtgagaatcccagctgtgtgtcagggctggaaagggctcgggagtgcgcggggcaagtgaccgtgtgtgtaaagagtgaggcgtatgaggctgtgtcggggcagagcccgaagatctcaatgatagggacttagggtgatagaagtgcaaagcatgactgtcaaatttttggagcaggttttctgacttcggtcggaaaaccccttttgacccattacccatctaagttagatgcttttttaaatgttttttaatttttaaatttttaatttttttcattatttattttttatttttgagacggatctcggctcactgtaacctccacctcccgggttcaagcgattctcctgactcagcctcccgagtagctgggattacaggcgcgcgccaccatgcccggctaatttttctatttttagtaaagacggggtttcgccatgttgaccagggtggtcttgaactcctgacgtcaggtgatcctcctgcctcgtgctgggattgcaggcgtgagccaccgctcccggcccttagatgctttttaatcagcaagtacgcaatgctttcctgacaggaatgtcaagtccgtcaggaaatccacataagggtgttaagcaggcaaagtaccacatacagattaaaatcaaaagcactgtcaacgcttatttaatttatacagtagaccctaacttttctaattttgtg

SEQ ID NO: 427 - DNA, 1087 bp, synthetic construct
  source 1..1087: mol_type = other DNA
gtttcttttgtaatccgaaacattctagtctgcgaattaaaagccattatttgaagaaggatgccccggctccatctggccaccgaaaggttgctccttaacacaggctaaggaccagcttctttgggagagaacagacgcaggggcgggagggaaaaagggagaggcagacgtcacttccccttggcggctctggcagcagattggtcggttgagtggcagaaaggcagacggggactgggcaaggcactgtcggtgacatcacggacagggcgacttctatgtagatgaggcagcgcagaggctgctgcttcgccacttgctgcttcgccacgaaggagttcccgtgccctgggagcgggttcaggaccgcggatcggaagtgagaatcccagctgtgtgtcagggctggaaagggctcgggagtgcgcggggcaagtgaccgtgtgtgtaaagagtgaggcgtatgaggctgtgtcggggcagagcccgaagatctcaatgatagggacttagggtgatagaagtgcaaagcatgactgtcaaatttttggagcaggttttctgacttcggtcggaaaacccctgtttacttggttttaaaaatagcttgcactagcgataccgcgaatatggttattaggtttgttaggcacagtcgtgtcttactatagaaaaataacgtagtgttcattttgctgcctgtatgtgttaatttgtccttattgcgccattgttcttgttaagtcttctgtaaggagttgcgggtttcaaactgtcagtctgagagcataagctcacttttcagtcagttgaattgaatgttacattcgattggttctggatattgatattacccaaggcttgtcctgtttgtaagtcttttcctacacctgacaatatgattatgtttacaatgtccctagaactctgggtgtatcgttcccactgaataaaatttgatctctaagttgacctataaatttaagtaccaaaaaactggtttgtaagattttggaaggcagaggcagggaagagaccaacgtggtctacatataaagtaccaggtacatataaagtaccaggt

SEQ ID NO: 428 - DNA, 1083 bp, synthetic construct
  source 1..1083: mol_type = other DNA
gtttcttttgtaatccgaaacattctagtctgcgaattaaaagccattatttgaagaaggatgccccggctccatctggccaccgaaaggttgctccttaacacaggctaaggaccagcttctttgggagagaacagacgcaggggcgggagggaaaaagggagaggcagacgtcacttccccttggcggctctggcagcagattggtcggttgagtggcagaaaggcagacggggactgggcaaggcactgtcggtgacatcacggacagggcgacttctatgtagatgaggcagcgcagaggctgctgcttcgccacttgctgcttcgccacgaaggagttcccgtgccctgggagcgggttcaggaccgcggatcggaagtgagaatcccagctgtgtgtcagggctggaaagggctcgggagtgcgcggggcaagtgaccgtgtgtgtaaagagtgaggcgtatgaggctgtgtcggggcagagcccgaagatctcaatgatagggacttagggtgatagaagtgcaaagcatgactgtcaaatttttggagcaggttttctgacttcggtcggaaaacccctatttttgtggtgctaaaagttagattgcattccgcccttctcacgtctctttacgtgttgtttgcgaggcgtggcctcggaggtaaatggtctccttttacctcagataagcttacctttgctctgtgagtaagaatgtagctacacttccaaatttagctattgtcctttgcggtccaaatgaaaatattaccttccgatctaacaatgttaaactagtcccaggcccttctatcgattgccagaatagactagactactacacagacacaccctctcaaatcaggccagctcctgcaacctgcacctacagtttgtcccctgggacaaatgaaaggacaggccctctttcccccccccccccaaatcagagcacacacagatcttggggtctggggcagaaatttcgttcatggaaaaaacaaacaaacaaacaaacacgatcaaaggaagctcgttccctttggcctcagggtttcttagacgccgtgttccc

SEQ ID NO: 429 - DNA, 1084 bp, synthetic construct
  source 1..1084: mol_type = other DNA
gtttcttttgtaatccgaaacattctagtctgcgaattaaaagccattatttgaagaaggatgccccggctccatctggccaccgaaaggttgctccttaacacaggctaaggaccagcttctttgggagagaacagacgcaggggcgggagggaaaaagggagaggcagacgtcacttccccttggcggctctggcagcagattggtcggttgagtggcagaaaggcagacggggactgggcaaggcactgtcggtgacatcacggacagggcgacttctatgtagatgaggcagcgcagaggctgctgcttcgccacttgctgcttcgccacgaaggagttcccgtgccctgggagcgggttcaggaccgcggatcggaagtgagaatcccagctgtgtgtcagggctggaaagggctcgggagtgcgcggggcaagtgaccgtgtgtgtaaagagtgaggcgtatgaggctgtgtcggggcagagcccgaagatctcaatgatagggacttagggtgatagaagtgcaaagcatgactgtcaaatttttggagcaggttttctgacttcggtcggaaaacccctataactggtaaccaaaagcagattactttcccccttgtggtcttcgcgtttgcggacgggagagaactttcggccattttccttttagaaatttaacttcttgaaggccaccaggtgacccttacttccctctcacctttccttctacctgtactttctctattaaaaagcctgcagaagtacccttgacaaattgccaaaaatgacacctaaaaaaaaaaaaaggaaaaacgacaccttaggtaattataggttgtaagaaaaagatttgacctcttggagtttttatttcttaataccaaaggacacccaaggaacgtatctctcaaaattgggtttcaaacctcagccgtttccttcttagttccagtgcttaacacgcaacagacctgcacaccactacactgcatacgagttttaaagttaataaatcagtcacccctccatagtcttctacctacttgaagacagaaacggctgctaggaagcaattcttc

SEQ ID NO: 430 - DNA, 1087 bp, synthetic construct
  source 1..1087: mol_type = other DNA
gtttcttttgtaatccgaaacattctagtctgcgaattaaaagccattatttgaagaaggatgccccggctccatctggccaccgaaaggttgctccttaacacaggctaaggaccagcttctttgggagagaacagacgcaggggcgggagggaaaaagggagaggcagacgtcacttccccttggcggctctggcagcagattggtcggttgagtggcagaaaggcagacggggactgggcaaggcactgtcggtgacatcacggacagggcgacttctatgtagatgaggcagcgcagaggctgctgcttcgccacttgctgcttcgccacgaaggagttcccgtgccctgggagcgggttcaggaccgcggatcggaagtgagaatcccagctgtgtgtcagggctggaaagggctcgggagtgcgcggggcaagtgaccgtgtgtgtaaagagtgaggcgtatgaggctgtgtcggggcagagcccgaagatctcaatgatagggacttagggtgatagaagtgcaaagcatgactgtcaaatttttggagcaggttttctgacttcggtcggaaaacccctctggggaataagagtggtttaaagaaagaacaatttgagagatctgcttagatctaataaaacccaagtatagtttctttagacgtcttatatctcacgtaggacctcttatttcagactcactgcaagaacaagctaaagaactatatacagtcaggaacaaggtgagccatcgcggttctcagtcccatgatcttaagagtttttcctcttcccctcttccctggctgtcctggagctcactctgtagaccaggctggtctcaaactcagaaatccacttacctctgcctcccaagggctgggattaaaggcatgcaccaccattgcccggcagggtatgtggactatgctgtccttcaactcagagatcgtggtactttaaatctcattttccgaaagaaaagaaaagaaaggaaggggggaaataaagccagtatattttgcacccacaatctgaagttctacaaatattgttagaaaatgcaaaggacccaagtc

SEQ ID NO: 431 - DNA, 1087 bp, synthetic construct
  source 1..1087: mol_type = other DNA
gtttcttttgtaatccgaaacattctagtctgcgaattaaaagccattatttgaagaaggatgccccggctccatctggccaccgaaaggttgctccttaacacaggctaaggaccagcttctttgggagagaacagacgcaggggcgggagggaaaaagggagaggcagacgtcacttccccttggcggctctggcagcagattggtcggttgagtggcagaaaggcagacggggactgggcaaggcactgtcggtgacatcacggacagggcgacttctatgtagatgaggcagcgcagaggctgctgcttcgccacttgctgcttcgccacgaaggagttcccgtgccctgggagcgggttcaggaccgcggatcggaagtgagaatcccagctgtgtgtcagggctggaaagggctcgggagtgcgcggggcaagtgaccgtgtgtgtaaagagtgaggcgtatgaggctgtgtcggggcagagcccgaagatctcaatgatagggacttagggtgatagaagtgcaaagcatgactgtcaaatttttggagcaggttttctgacttcggtcggaaaacccctctcggtttatcttaaagggttttaaatatagaaagcttccttagtcttatgggtgagagtgctgtttaagccttacctaggtatgtctttgaacatttattacagattgttatttgtgactatgaccactcaggtgttctgttcttgtgaatttagacacactcagaaaggctacacactcaaagaccacaccaaagtgaagtactatctgggccgtgaaactggtcacatatcagttattttgcagtaaaacaaggaagtcaatcatactgcttcagtgggtcagggagtcaagaatgcacagtacaagagctggtgagattcctcagcaggtaagagcactgaatgctcttccaaagattctgagttcaaatcccagcaaccacgtggtggatttgaacaaaggatgaaaacaaccatccataaccagatctgatgccctcttctggagtgtcaaaagacagctatggtgtacttacataaataaataagtaaaaaca

SEQ ID NO: 432 - DNA, 1087 bp, synthetic construct
  source 1..1087: mol_type = other DNA
gtttcttttgtaatccgaaacattctagtctgcgaattaaaagccattatttgaagaaggatgccccggctccatctggccaccgaaaggttgctccttaacacaggctaaggaccagcttctttgggagagaacagacgcaggggcgggagggaaaaagggagaggcagacgtcacttccccttggcggctctggcagcagattggtcggttgagtggcagaaaggcagacggggactgggcaaggcactgtcggtgacatcacggacagggcgacttctatgtagatgaggcagcgcagaggctgctgcttcgccacttgctgcttcgccacgaaggagttcccgtgccctgggagcgggttcaggaccgcggatcggaagtgagaatcccagctgtgtgtcagggctggaaagggctcgggagtgcgcggggcaagtgaccgtgtgtgtaaagagtgaggcgtatgaggctgtgtcggggcagagcccgaagatctcaatgatagggacttagggtgatagaagtgcaaagcatgactgtcaaatttttggagcaggttttctgacttcggtcggaaaacccctccacattttgtgtttaaaaatagaaatatttaagtgagatcagtttaaatctgctttatctagggtgtctaactgcttgcatctttttaacttttccttatttgtgagaaggtctgtaaaacttattatatgttagtacactgtagctgtcttcagacactccagaagagggattcagatcaccttacagatggttttgagccaccatgtggttgctgggatttgaactcaggacctttagaaaagtagttgggtgctcttacccgctgagccatctcaccagccctttttttttcttttttccagttcgggtttctctgtgtgtagccctggctgtcctggaactcattctgtagaccgggctggcctcgaactcagaaatctgcctgcctctgcctcccaagtgctgggattaaaggaatgtgccttcattgcccggctctagggctttttgttgttgtttgtttgtttgtttgtttgtttgcttttgtggatggcct

SEQ ID NO: 433 - DNA, 1087 bp, synthetic construct
  source 1..1087: mol_type = other DNA
gtttcttttgtaatccgaaacattctagtctgcgaattaaaagccattatttgaagaaggatgccccggctccatctggccaccgaaaggttgctccttaacacaggctaaggaccagcttctttgggagagaacagacgcaggggcgggagggaaaaagggagaggcagacgtcacttccccttggcggctctggcagcagattggtcggttgagtggcagaaaggcagacggggactgggcaaggcactgtcggtgacatcacggacagggcgacttctatgtagatgaggcagcgcagaggctgctgcttcgccacttgctgcttcgccacgaaggagttcccgtgccctgggagcgggttcaggaccgcggatcggaagtgagaatcccagctgtgtgtcagggctggaaagggctcgggagtgcgcggggcaagtgaccgtgtgtgtaaagagtgaggcgtatgaggctgtgtcggggcagagcccgaagatctcaatgatagggacttagggtgatagaagtgcaaagcatgactgtcaaatttttggagcaggttttctgacttcggtcggaaaacccctaaaaccagtaagggagaaaggtcaagtaacatataaaggaaggcctatcagaattacaccagacttttcaccagagactatgaaagccagaagagcctggacagatgttatacagacactaagagaacacaaatgccagcccaggctactatacctggccaaactctcaattaccatagatggagaaaccaaagtattccacgacaaaaacaaattcacacaatatctttccacgaatccagcccttcaaaggataatgacagaaaagaagcaatacaaggacggaaatcacgccctagaacaaccaagaaactaatcattcaacaaaccaaaaagaagacagccacaagaacagaatgccaactctaacaacaaaaataaaaggaagcaacaattacttttccttaatatctcttaatatcaatggactcaattccccaataaaaagacatagactaacagactggctacacaaacaggacccaacattctgctgctta

SEQ ID NO: 434 - DNA, 1087 bp, synthetic construct
  source 1..1087: mol_type = other DNA
gtttcttttgtaatccgaaacattctagtctgcgaattaaaagccattatttgaagaaggatgccccggctccatctggccaccgaaaggttgctccttaacacaggctaaggaccagcttctttgggagagaacagacgcaggggcgggagggaaaaagggagaggcagacgtcacttccccttggcggctctggcagcagattggtcggttgagtggcagaaaggcagacggggactgggcaaggcactgtcggtgacatcacggacagggcgacttctatgtagatgaggcagcgcagaggctgctgcttcgccacttgctgcttcgccacgaaggagttcccgtgccctgggagcgggttcaggaccgcggatcggaagtgagaatcccagctgtgtgtcagggctggaaagggctcgggagtgcgcggggcaagtgaccgtgtgtgtaaagagtgaggcgtatgaggctgtgtcggggcagagcccgaagatctcaatgatagggacttagggtgatagaagtgcaaagcatgactgtcaaatttttggagcaggttttctgacttcggtcggaaaacccctcccaatttcactggtctacaatgaaagcaaaacagttctcttccccgctccccggtgtgtgagaggggctttgatccttctctggtttcctaggaaacgcgtatgtgctagagccacgctctgagacttccgcctcgtgcggtcccgcttcctttctgcctcctctggcctgcatccgtgggggaggtggctggctgcagggttctccggatctcttctgtgttcccactactcaagcaccgagtggcgttctatggcgtccgcctcggctcagcccgcggccctgagcgcggagcaggccaagggtgaggaaagagcctagtctgggtgtgggccgtcttctggggggagggcgcgatactattctttgcctctccaagtggggcccttgcccattagggcgaagggttgggaggacaagcttatcgggttgcttgcaggcctcggcccactaattccctgcctcttccctcctctgggctcgcccgccgtcctccgcg

SEQ ID NO: 435 - DNA, 1087 bp, synthetic construct
  source 1..1087: mol_type = other DNA
gtttcttttgtaatccgaaacattctagtctgcgaattaaaagccattatttgaagaaggatgccccggctccatctggccaccgaaaggttgctccttaacacaggctaaggaccagcttctttgggagagaacagacgcaggggcgggagggaaaaagggagaggcagacgtcacttccccttggcggctctggcagcagattggtcggttgagtggcagaaaggcagacggggactgggcaaggcactgtcggtgacatcacggacagggcgacttctatgtagatgaggcagcgcagaggctgctgcttcgccacttgctgcttcgccacgaaggagttcccgtgccctgggagcgggttcaggaccgcggatcggaagtgagaatcccagctgtgtgtcagggctggaaagggctcgggagtgcgcggggcaagtgaccgtgtgtgtaaagagtgaggcgtatgaggctgtgtcggggcagagcccgaagatctcaatgatagggacttagggtgatagaagtgcaaagcatgactgtcaaatttttggagcaggttttctgacttcggtcggaaaacccctgaatttgttaaattacaggaggaagcttttttagttcattttacaaatactttcttgttaggtagataataccttctaaggttattatctggatcttctaagtctttttatcgctagcaagtctaagtttctggactttggaattagaagttaatgtcgtaggcgggcatggtggtccacgcctttaatcccagagtttgggaggcagacgcaggtggttttctgagttcgaggccatcctgctcttcaatgttagttccaggacagccagggttatacaaagaaaccctgtctcgagaaacaaaacaaacaaaaaaagagtagctgagtgctctgagttgtctctccagccccttagctatttattttcatttaaattatttttgttttattcgcttgtgtgcctgagtttgaatttcccgggattaacagttgaagactagggctggtgagatggctcagcggttaagattgccgactgctcttccaaaggtcctgag

SEQ ID NO: 436 - DNA, 1087 bp, synthetic construct
  source 1..1087: mol_type = other DNA
gtttcttttgtaatccgaaacattctagtctgcgaattaaaagccattatttgaagaaggatgccccggctccatctggccaccgaaaggttgctccttaacacaggctaaggaccagcttctttgggagagaacagacgcaggggcgggagggaaaaagggagaggcagacgtcacttccccttggcggctctggcagcagattggtcggttgagtggcagaaaggcagacggggactgggcaaggcactgtcggtgacatcacggacagggcgacttctatgtagatgaggcagcgcagaggctgctgcttcgccacttgctgcttcgccacgaaggagttcccgtgccctgggagcgggttcaggaccgcggatcggaagtgagaatcccagctgtgtgtcagggctggaaagggctcgggagtgcgcggggcaagtgaccgtgtgtgtaaagagtgaggcgtatgaggctgtgtcggggcagagcccgaagatctcaatgatagggacttagggtgatagaagtgcaaagcatgactgtcaaatttttggagcaggttttctgacttcggtcggaaaacccctaccccctaattctacaagaatagaaagcttagcagctcctctgaatggttgctctcaggtgctagtggttgcaagtcgtatgttgatgcctgcctttgccctacctggtgtgtgagcgtgagcgcgccccacctctccagcctctctcttactgtttttcagacaagatgggactgttgttctcctactgctatgtacctcaatttcaattgatcatgcctggacataactgcccatgttgtaaggtcgtctacgttgtaaggtcgtgctcagtttctgatgcctagactagtcacctttccgtttgcctcctgactgtgtaaatgaggcaaatgaaggtggtctcttaactgacatgttagtgtttgacctatgggatagtttctcattgttgagacagaatttctagaagctggtccgctgagcggctaagagcacttgctgatattgcaaaggatctacctgggtttggttctcagcactcacatggaagttcacat

SEQ ID NO: 437 - DNA, 654 bp, synthetic construct
  source 1..654: mol_type = other DNA
gtttcttttgtaatccgaaacattctagtctgcgaattaaaagccattatttgaagaaggatgccccggctccatctggccaccgaaaggttgctccttaacacaggctaaggaccagcttctttgggagagaacagacgcaggggcgggagggaaaaagggagaggcagacgtcacttccccttggcggctctggcagcagattggtcggttgagtggcagaaaggcagacggggactgggcaaggcactgtcggtgacatcacggacagggcgacttctatgtagatgaggcagcgcagaggctgctgcttcgccacttgctgcttcgccacgaaggagttcccgtgccctgggagcgggttcaggaccgcggatcggaagtgagaatcccagctgtgtgtcagggctggaaagggctcgggagtgcgcggggcaagtgaccgtgtgtgtaaagagtgaggcgtatgaggctgtgtcggggcagagcccgaagatctcaatgatagggacttagggtgatagaagtgcaaagcatgactgtcaaatttttggagcaggttttctgacttcggtcggaaaaccccttgtagttcctgcaatttaattttcgtttaaaactttattttattctttaacttaaaaaaaatatata

SEQ ID NO: 438 - DNA, 1087 bp, synthetic construct
  source 1..1087: mol_type = other DNA
tctccccgcccgcgggcggcgaagtaaaggcccagcgcagcccgcgctcctgccctggagcctcgtctttctccaggaaaacgtggaccgctctccgccgacaggtctcttccacagacccctgtcgccttcgcccccggtctcttccggttctgtcttttcgctggctcgatacgaacaaggaagtcgcccccagcggagccccggctcccccaggcagaggcggccccgggggcggagtcaacggcggaggccacgccctctgtgaaagggcggggcatgcaaattcgaaatgaaagcccgggaacgccggaagaagcacgggtgtaagatttcccttttcaaaggcagagaataagaaatcagcccgagagtgtaagggcgtcaatagcgctgtggacgagacagagggaatggggcaaggagcgaggctggggctctcaccgcgacttgaatgtggatgagagtgggacggtgacggcgggcgcgaaggcgagcgcaatgatagggacttagggtgatagaagtgcaaagcatgactgtcaaatttttggagcaggttttctgacttcggtcggaaaacccctactttctggagtttcaaaaacagactgtacgccaagggtcatatctttttttgtattggtttgtgtcttggttggtgtcttaggtgttaatcctacagtggagggtttatgggaataggaagtaacatgtcgcctgcatgtcataggagaaaaagcgagcatcagccgtatcggctttgtaacacaaattagctatcgtgaagtccgctcagctcttccctttctaccctggctgctttttgcagggattggtccgtggtctccagtctcttgggttctcaccctgtgtgaaaatcttcgtgtttttccctaccccccagtcacctcttacacagcctctgcttccaagcgcagcccccacaggagtttgtaggatttctgtgctagcggggaatgtgttctcacctcatagagccaggtagaaattatgcagatgggcagttctctgggaagaaagcagggcctttggggctctcagtgtccccgttgggttgtagaca

SEQ ID NO: 439 - DNA, 1087 bp, synthetic construct
  source 1..1087: mol_type = other DNA
tctccccgcccgcgggcggcgaagtaaaggcccagcgcagcccgcgctcctgccctggagcctcgtctttctccaggaaaacgtggaccgctctccgccgacaggtctcttccacagacccctgtcgccttcgcccccggtctcttccggttctgtcttttcgctggctcgatacgaacaaggaagtcgcccccagcggagccccggctcccccaggcagaggcggccccgggggcggagtcaacggcggaggccacgccctctgtgaaagggcggggcatgcaaattcgaaatgaaagcccgggaacgccggaagaagcacgggtgtaagatttcccttttcaaaggcagagaataagaaatcagcccgagagtgtaagggcgtcaatagcgctgtggacgagacagagggaatggggcaaggagcgaggctggggctctcaccgcgacttgaatgtggatgagagtgggacggtgacggcgggcgcgaaggcgagcgcaatgatagggacttagggtgatagaagtgcaaagcatgactgtcaaatttttggagcaggttttctgacttcggtcggaaaacccctactttctggagtttctaaaagtagactgtacgctaagggtcatatctttttttgttttggtttgtgtcttggttggcgtcttaaatgttaatcctacagtggagggctggcgaataggaagtaacatgtcgcctgcacgccataggagaaaaagcgagcatcagccgtatcggctttgtaacacaaattagctatcgtgaagtccgctcagctcttccctttctaccctggctgctttttgcagggattggtccgtggtctccagtctcttgggttctcaccctgtgtgaaaatcttcctgtttttccctaccccccaagtcacctcttacacagcctctgcttccaagcgcagcccccacaggagtttgtaggatttctgtgctagcggggagtgtgttctcacctcatagagccaggtagaaactacgcagatgggtgctgttctccaggaagaaagcagggcctttggggctctcagtgtccccgttgggttgtaga

SEQ ID NO: 440 - DNA, 1087 bp, synthetic construct
  source 1..1087: mol_type = other DNA
tctccccgcccgcgggcggcgaagtaaaggcccagcgcagcccgcgctcctgccctggagcctcgtctttctccaggaaaacgtggaccgctctccgccgacaggtctcttccacagacccctgtcgccttcgcccccggtctcttccggttctgtcttttcgctggctcgatacgaacaaggaagtcgcccccagcggagccccggctcccccaggcagaggcggccccgggggcggagtcaacggcggaggccacgccctctgtgaaagggcggggcatgcaaattcgaaatgaaagcccgggaacgccggaagaagcacgggtgtaagatttcccttttcaaaggcagagaataagaaatcagcccgagagtgtaagggcgtcaatagcgctgtggacgagacagagggaatggggcaaggagcgaggctggggctctcaccgcgacttgaatgtggatgagagtgggacggtgacggcgggcgcgaaggcgagcgcaatgatagggacttagggtgatagaagtgcaaagcatgactgtcaaatttttggagcaggttttctgacttcggtcggaaaacccctactttctggagtttcaaaaacagaccgtacgccaagggtcatgtcttttttcgtattggtttgtgtcttagttgttaatcctacagtggaggcctggggaataagaagtaacatgtggcctgcacgccataggagaaaaagcgagcatcagccgtatcggctttgtaacacaaattagctatcgtgaagtccgctcagctcttccatttctaccctggctgctttttgcagggattggtccgtggtctccagtctcttgggttctcaccctgtgtgaaaatcttcgtgtttttccctaccccccaagtcacctcttacacagcctctgcttccaagcgcagcccccacaggagtttgtaggatttctgtgctagcggggagtgtgttctcacctcatagagccaggtagaaattatgcagatgggcgctgttctctgggaagaaagcagggcctttggggctctcagtgtccccgttgggttgtagacataacactctta

SEQ ID NO: 441 - DNA, 891 bp, synthetic construct
  source 1..891: mol_type = other DNA
tctccccgcccgcgggcggcgaagtaaaggcccagcgcagcccgcgctcctgccctggagcctcgtctttctccaggaaaacgtggaccgctctccgccgacaggtctcttccacagacccctgtcgccttcgcccccggtctcttccggttctgtcttttcgctggctcgatacgaacaaggaagtcgcccccagcggagccccggctcccccaggcagaggcggccccgggggcggagtcaacggcggaggccacgccctctgtgaaagggcggggcatgcaaattcgaaatgaaagcccgggaacgccggaagaagcacgggtgtaagatttcccttttcaaaggcagagaataagaaatcagcccgagagtgtaagggcgtcaatagcgctgtggacgagacagagggaatggggcaaggagcgaggctggggctctcaccgcgacttgaatgtggatgagagtgggacggtgacggcgggcgcgaaggcgagcgcaatgatagggacttagggtgatagaagtgcaaagcatgactgtcaaatttttggagcaggttttctgacttcggtcggaaaacccctcctccggggatacaacgtgtttcctaaaagtagagggaggtaagagacggtagcacctgcggggcggcttgcacgccgagtgcctgtgacgcgccggcttaacttaactgcttccctgaagtaccttgaggttcctgatgtgcgggcggtagacggtaggcttatgcggcacgctgtcgtttccaccgtggctactgcgctttgggaaggccacgacctcctcctttggggaggtccttaggatctcagcttggcagtcgagtgggtggcgaccttttaaaggaatgggacccacccggagttc

SEQ ID NO: 442 - DNA, 1079 bp, synthetic construct
  source 1..1079: mol_type = other DNA
tctccccgcccgcgggcggcgaagtaaaggcccagcgcagcccgcgctcctgccctggagcctcgtctttctccaggaaaacgtggaccgctctccgccgacaggtctcttccacagacccctgtcgccttcgcccccggtctcttccggttctgtcttttcgctggctcgatacgaacaaggaagtcgcccccagcggagccccggctcccccaggcagaggcggccccgggggcggagtcaacggcggaggccacgccctctgtgaaagggcggggcatgcaaattcgaaatgaaagcccgggaacgccggaagaagcacgggtgtaagatttcccttttcaaaggcagagaataagaaatcagcccgagagtgtaagggcgtcaatagcgctgtggacgagacagagggaatggggcaaggagcgaggctggggctctcaccgcgacttgaatgtggatgagagtgggacggtgacggcgggcgcgaaggcgagcgcaatgatagggacttagggtgatagaagtgcaaagcatgactgtcaaatttttggagcaggttttctgacttcggtcggaaaacccctttcccttcttgtaatacaaaataataacaaccacagaggacatcgcaagtaaaatgtgtataacaaccccatctaaagaaccctatcatctttctactatctgtctacctaaatatgtatagtataaataaccctatatagcactctaagcaacttaagttaggtaacttagaaaactcttttttttttttgagactgagtctcactctgtcgcacccaggctggagtgcagtggcgtgatctcggctcactgcaacctccaccttctgggttcaagtgattctcccatctcagtctcccaagtagctgggattacaggcacgccaccatgccctgctacatttttttttttttagtagagatgaggtttcaccacattggccaggctgttctcgaactcctgacctcaggtgatccgcccaccttggcctcatgaagtgctgggattacaggtgtgagccactgtacccagccagaaaactcttaaaaaac

SEQ ID NO: 443 - DNA, 969 bp, synthetic construct
  source 1..969: mol_type = other DNA
tctccccgcccgcgggcggcgaagtaaaggcccagcgcagcccgcgctcctgccctggagcctcgtctttctccaggaaaacgtggaccgctctccgccgacaggtctcttccacagacccctgtcgccttcgcccccggtctcttccggttctgtcttttcgctggctcgatacgaacaaggaagtcgcccccagcggagccccggctcccccaggcagaggcggccccgggggcggagtcaacggcggaggccacgccctctgtgaaagggcggggcatgcaaattcgaaatgaaagcccgggaacgccggaagaagcacgggtgtaagatttcccttttcaaaggcagagaataagaaatcagcccgagagtgtaagggcgtcaatagcgctgtggacgagacagagggaatggggcaaggagcgaggctggggctctcaccgcgacttgaatgtggatgagagtgggacggtgacggcgggcgcgaaggcgagcgcaatgatagggacttagggtgatagaagtgcaaagcatgactgtcaaatttttggagcaggttttctgacttcggtcggaaaacccctctgaattttcttgcagttgaacaacagaggctttttttgtgtgtgtgggggtgcttggttttgggaggttgaagagtacttgttcgcaaactctctaaatgagagatggggaagtgtcttaccagctgattcgcgagagcacctgcaagtttacctgttttagtgatttgcgtttatgaaagttggagttgctgattttgtgatctctacttttaaggtaaaagcagggcggtgttgacttttcttgccagttggctgtcctgttttctttctcgcactgttttctttttgagacgaagtctgtcgctcaggctggagtgcactggcgtgatctcggctcgctgcaaactttgccgaacccctgtttagcgatttccgtttg

SEQ ID NO: 444 - DNA, 1087 bp, synthetic construct
  source 1..1087: mol_type = other DNA
tctccccgcccgcgggcggcgaagtaaaggcccagcgcagcccgcgctcctgccctggagcctcgtctttctccaggaaaacgtggaccgctctccgccgacaggtctcttccacagacccctgtcgccttcgcccccggtctcttccggttctgtcttttcgctggctcgatacgaacaaggaagtcgcccccagcggagccccggctcccccaggcagaggcggccccgggggcggagtcaacggcggaggccacgccctctgtgaaagggcggggcatgcaaattcgaaatgaaagcccgggaacgccggaagaagcacgggtgtaagatttcccttttcaaaggcagagaataagaaatcagcccgagagtgtaagggcgtcaatagcgctgtggacgagacagagggaatggggcaaggagcgaggctggggctctcaccgcgacttgaatgtggatgagagtgggacggtgacggcgggcgcgaaggcgagcgcaatgatagggacttagggtgatagaagtgcaaagcatgactgtcaaatttttggagcaggttttctgacttcggtcggaaaacccctatatgtggtaatccaacaatagaaattatttttaagtttgtgtgttcctttttctgttcaatggtgcttttgatattgttgtaaagcagtgactagcagattctgtgtggtaaaagcactgaaccctgtttagttcttttctccctaccttattggtaattatttctgtgtatatatgttccaaagaaatgcggcttgtatattcatgcttttcaactttttgtgatagacagttgatacacaagtagtacctcctccgggatcttcttagtcaagactgtttggtagatgcatgttttttgttacttgtaatgtacagtattcagttcattttctttttgcagcactgtccggttgaaacacaacgcgaggatcgggcgtggtggctcacgcctgtaatcccagcactttgggaggccgaggcaggacaatcaagaccaatcctggtcatcaaggcaggagaatcaagaccatcgaggtcaggagatcaagaccatcct

SEQ ID NO: 445 - DNA, 1085 bp, synthetic construct
  source 1..1085: mol_type = other DNA
tctccccgcccgcgggcggcgaagtaaaggcccagcgcagcccgcgctcctgccctggagcctcgtctttctccaggaaaacgtggaccgctctccgccgacaggtctcttccacagacccctgtcgccttcgcccccggtctcttccggttctgtcttttcgctggctcgatacgaacaaggaagtcgcccccagcggagccccggctcccccaggcagaggcggccccgggggcggagtcaacggcggaggccacgccctctgtgaaagggcggggcatgcaaattcgaaatgaaagcccgggaacgccggaagaagcacgggtgtaagatttcccttttcaaaggcagagaataagaaatcagcccgagagtgtaagggcgtcaatagcgctgtggacgagacagagggaatggggcaaggagcgaggctggggctctcaccgcgacttgaatgtggatgagagtgggacggtgacggcgggcgcgaaggcgagcgcaatgatagggacttagggtgatagaagtgcaaagcatgactgtcaaatttttggagcaggttttctgacttcggtcggaaaacccctacatcaggttgtttttctgtttttacatcaggttgtttttctgtttggttttttttttacaccacgtttatacgccggtgcacggtttaccactgaaaacacctttcatctacaggtgatatcttttaacacaaataaaatgtagtagtcctaggagacggaatagaaggaggtggggcctaggcagattcatctctgcggtgcattttgcctctggccctcgggccctagtttgcgatctttcccatcttgcctctgcttccctctgcacaatcctgagtattgcagtaccttacacttaaggaaatttcgtcttgccaaagttgatccatttcagctccgaaacataacaggaactagtgcaacgataaacgtatgaggaacttgcaataagagtgacagaatcctttgaatcaaaaaaaaaaaaagccaccacttaatgagtatctaccatatgtcaagggcttcaccaatatttcattgaaatattccagacca

SEQ ID NO: 446 - DNA, 1087 bp, synthetic construct
  source 1..1087: mol_type = other DNA
tctccccgcccgcgggcggcgaagtaaaggcccagcgcagcccgcgctcctgccctggagcctcgtctttctccaggaaaacgtggaccgctctccgccgacaggtctcttccacagacccctgtcgccttcgcccccggtctcttccggttctgtcttttcgctggctcgatacgaacaaggaagtcgcccccagcggagccccggctcccccaggcagaggcggccccgggggcggagtcaacggcggaggccacgccctctgtgaaagggcggggcatgcaaattcgaaatgaaagcccgggaacgccggaagaagcacgggtgtaagatttcccttttcaaaggcagagaataagaaatcagcccgagagtgtaagggcgtcaatagcgctgtggacgagacagagggaatggggcaaggagcgaggctggggctctcaccgcgacttgaatgtggatgagagtgggacggtgacggcgggcgcgaaggcgagcgcaatgatagggacttagggtgatagaagtgcaaagcatgactgtcaaatttttggagcaggttttctgacttcggtcggaaaacccctcttatgatgtttgttgccaatgatagattgttttcactgtgcaaaaattatgggtagttttggtggtcttgatgcagttgtaagcttggggtatgaaggtttgggccacgcctgggcgcttccggctgcgccggatgctgtttcctttccgctcccaggggcgttgggaacggttgtaggacgtggctctttattcgtgagttttccatttacctccgctgaacctagagcttcagacgccctatggcgtccgcctcgacccaaccggcggccttgagcgctgagcaagcaaagggtgagaatcgtcctagtcaaggcataggctgctggcctggggtagtcaaggcatgggctgctggtctggggaggatgcgggcggaggatgtggggcgacaaacctggctacgtccgccgggaaaatggggtaggggacgccgggtaccgtccttctaagtggggcgcttgcccccaagacttgggatcttattgggttacctaca

SEQ ID NO: 447 - DNA, 1085 bp, synthetic construct
  source 1..1085: mol_type = other DNA
tctccccgcccgcgggcggcgaagtaaaggcccagcgcagcccgcgctcctgccctggagcctcgtctttctccaggaaaacgtggaccgctctccgccgacaggtctcttccacagacccctgtcgccttcgcccccggtctcttccggttctgtcttttcgctggctcgatacgaacaaggaagtcgcccccagcggagccccggctcccccaggcagaggcggccccgggggcggagtcaacggcggaggccacgccctctgtgaaagggcggggcatgcaaattcgaaatgaaagcccgggaacgccggaagaagcacgggtgtaagatttcccttttcaaaggcagagaataagaaatcagcccgagagtgtaagggcgtcaatagcgctgtggacgagacagagggaatggggcaaggagcgaggctggggctctcaccgcgacttgaatgtggatgagagtgggacggtgacggcgggcgcgaaggcgagcgcaatgatagggacttagggtgatagaagtgcaaagcatgactgtcaaatttttggagcaggttttctgacttcggtcggaaaaccccttctttactgttatatgttaggcgaaatattacgcgtttggagtaagtggtgctttttgtaactgaaaagagattctgtgtgtgtttttttttttttagaggctgcatagttatttgtatgaaccgcaggtgacctaattagcaaggtaattcagacctgtatcctagcacttaagaagtggaagtgggataaccctgcgtgttctcgtgtgggaggctagcttaagcaacaaagcaggaaggccccaccaacaaaagaatttaaaaattatacgtgcgtggtggcgcgcgtatgaggaaattatttggcaactgtgttacagtatagcagcaaatggaatagacctagtccctgactttaggagacctgcctcagccccccgaatggctgggactacaggcgtgcgcctccgcgcccagctaatttttgcatttttggtagagacgggttcaccatgttggccaggatggtctccatctcttcatctggtgatccgcc

SEQ ID NO: 448 - DNA, 1087 bp, synthetic construct
  source 1..1087: mol_type = other DNA
tctccccgcccgcgggcggcgaagtaaaggcccagcgcagcccgcgctcctgccctggagcctcgtctttctccaggaaaacgtggaccgctctccgccgacaggtctcttccacagacccctgtcgccttcgcccccggtctcttccggttctgtcttttcgctggctcgatacgaacaaggaagtcgcccccagcggagccccggctcccccaggcagaggcggccccgggggcggagtcaacggcggaggccacgccctctgtgaaagggcggggcatgcaaattcgaaatgaaagcccgggaacgccggaagaagcacgggtgtaagatttcccttttcaaaggcagagaataagaaatcagcccgagagtgtaagggcgtcaatagcgctgtggacgagacagagggaatggggcaaggagcgaggctggggctctcaccgcgacttgaatgtggatgagagtgggacggtgacggcgggcgcgaaggcgagcgcaatgatagggacttagggtgatagaagtgcaaagcatgactgtcaaatttttggagcaggttttctgacttcggtcggaaaacccctaccttattcacgcctaaaaagtagactgactgtggggtggtcgtgttttttgtttcttgttggtaggtggtgaatgcgtttttttcgttgttttctccgttactcaggctgccagttgcttggcagtcttgtcgctggctgtggacgctctgcacttcatcaccgtccccagctgcgctttgagccggtctaaggttgcccacagtattgacgttgggacccacgaaactggcaatttccatgtgtgcggccttacccagttctcccaaacttctgcgtataaccgcttctctgtgcttcagaaagataagtccggccccggcctcacacagcagctcagttcgtgacagcgtttaatatgtaaaatggagcaaataatttatagggcgttgggagagttaaagagactaattcatttacgtgttaaatacagggaatggcttttgcattgatataaccccagcctccagcatgcgccagacctgacgtaggtgttcggc

SEQ ID NO: 449 - DNA, 1087 bp, synthetic construct
  source 1..1087: mol_type = other DNA
tctccccgcccgcgggcggcgaagtaaaggcccagcgcagcccgcgctcctgccctggagcctcgtctttctccaggaaaacgtggaccgctctccgccgacaggtctcttccacagacccctgtcgccttcgcccccggtctcttccggttctgtcttttcgctggctcgatacgaacaaggaagtcgcccccagcggagccccggctcccccaggcagaggcggccccgggggcggagtcaacggcggaggccacgccctctgtgaaagggcggggcatgcaaattcgaaatgaaagcccgggaacgccggaagaagcacgggtgtaagatttcccttttcaaaggcagagaataagaaatcagcccgagagtgtaagggcgtcaatagcgctgtggacgagacagagggaatggggcaaggagcgaggctggggctctcaccgcgacttgaatgtggatgagagtgggacggtgacggcgggcgcgaaggcgagcgcaatgatagggacttagggtgatagaagtgcaaagcatgactgtcaaatttttggagcaggttttctgacttcggtcggaaaaccccttttgacccattacccatctaagttagatgcttttttaaatgttttttaatttttaaatttttaatttttttcattatttattttttatttttgagacggatctcggctcactgtaacctccacctcccgggttcaagcgattctcctgactcagcctcccgagtagctgggattacaggcgcgcgccaccatgcccggctaatttttctatttttagtaaagacggggtttcgccatgttgaccagggtggtcttgaactcctgacgtcaggtgatcctcctgcctcgtgctgggattgcaggcgtgagccaccgctcccggcccttagatgctttttaatcagcaagtacgcaatgctttcctgacaggaatgtcaagtccgtcaggaaatccacataagggtgttaagcaggcaaagtaccacatacagattaaaatcaaaagcactgtcaacgcttatttaatttatacagtagaccctaacttttctaattttgtg

SEQ ID NO: 450 - DNA, 1087 bp, synthetic construct
  source 1..1087: mol_type = other DNA
tctccccgcccgcgggcggcgaagtaaaggcccagcgcagcccgcgctcctgccctggagcctcgtctttctccaggaaaacgtggaccgctctccgccgacaggtctcttccacagacccctgtcgccttcgcccccggtctcttccggttctgtcttttcgctggctcgatacgaacaaggaagtcgcccccagcggagccccggctcccccaggcagaggcggccccgggggcggagtcaacggcggaggccacgccctctgtgaaagggcggggcatgcaaattcgaaatgaaagcccgggaacgccggaagaagcacgggtgtaagatttcccttttcaaaggcagagaataagaaatcagcccgagagtgtaagggcgtcaatagcgctgtggacgagacagagggaatggggcaaggagcgaggctggggctctcaccgcgacttgaatgtggatgagagtgggacggtgacggcgggcgcgaaggcgagcgcaatgatagggacttagggtgatagaagtgcaaagcatgactgtcaaatttttggagcaggttttctgacttcggtcggaaaacccctgtttacttggttttaaaaatagcttgcactagcgataccgcgaatatggttattaggtttgttaggcacagtcgtgtcttactatagaaaaataacgtagtgttcattttgctgcctgtatgtgttaatttgtccttattgcgccattgttcttgttaagtcttctgtaaggagttgcgggtttcaaactgtcagtctgagagcataagctcacttttcagtcagttgaattgaatgttacattcgattggttctggatattgatattacccaaggcttgtcctgtttgtaagtcttttcctacacctgacaatatgattatgtttacaatgtccctagaactctgggtgtatcgttcccactgaataaaatttgatctctaagttgacctataaatttaagtaccaaaaaactggtttgtaagattttggaaggcagaggcagggaagagaccaacgtggtctacatataaagtaccaggtacatataaagtaccaggt

SEQ ID NO: 451 - DNA, 1083 bp, synthetic construct
  source 1..1083: mol_type = other DNA
tctccccgcccgcgggcggcgaagtaaaggcccagcgcagcccgcgctcctgccctggagcctcgtctttctccaggaaaacgtggaccgctctccgccgacaggtctcttccacagacccctgtcgccttcgcccccggtctcttccggttctgtcttttcgctggctcgatacgaacaaggaagtcgcccccagcggagccccggctcccccaggcagaggcggccccgggggcggagtcaacggcggaggccacgccctctgtgaaagggcggggcatgcaaattcgaaatgaaagcccgggaacgccggaagaagcacgggtgtaagatttcccttttcaaaggcagagaataagaaatcagcccgagagtgtaagggcgtcaatagcgctgtggacgagacagagggaatggggcaaggagcgaggctggggctctcaccgcgacttgaatgtggatgagagtgggacggtgacggcgggcgcgaaggcgagcgcaatgatagggacttagggtgatagaagtgcaaagcatgactgtcaaatttttggagcaggttttctgacttcggtcggaaaacccctatttttgtggtgctaaaagttagattgcattccgcccttctcacgtctctttacgtgttgtttgcgaggcgtggcctcggaggtaaatggtctccttttacctcagataagcttacctttgctctgtgagtaagaatgtagctacacttccaaatttagctattgtcctttgcggtccaaatgaaaatattaccttccgatctaacaatgttaaactagtcccaggcccttctatcgattgccagaatagactagactactacacagacacaccctctcaaatcaggccagctcctgcaacctgcacctacagtttgtcccctgggacaaatgaaaggacaggccctctttcccccccccccccaaatcagagcacacacagatcttggggtctggggcagaaatttcgttcatggaaaaaacaaacaaacaaacaaacacgatcaaaggaagctcgttccctttggcctcagggtttcttagacgccgtgttccc

SEQ ID NO: 452 - DNA, 1084 bp, synthetic construct
  source 1..1084: mol_type = other DNA
tctccccgcccgcgggcggcgaagtaaaggcccagcgcagcccgcgctcctgccctggagcctcgtctttctccaggaaaacgtggaccgctctccgccgacaggtctcttccacagacccctgtcgccttcgcccccggtctcttccggttctgtcttttcgctggctcgatacgaacaaggaagtcgcccccagcggagccccggctcccccaggcagaggcggccccgggggcggagtcaacggcggaggccacgccctctgtgaaagggcggggcatgcaaattcgaaatgaaagcccgggaacgccggaagaagcacgggtgtaagatttcccttttcaaaggcagagaataagaaatcagcccgagagtgtaagggcgtcaatagcgctgtggacgagacagagggaatggggcaaggagcgaggctggggctctcaccgcgacttgaatgtggatgagagtgggacggtgacggcgggcgcgaaggcgagcgcaatgatagggacttagggtgatagaagtgcaaagcatgactgtcaaatttttggagcaggttttctgacttcggtcggaaaacccctataactggtaaccaaaagcagattactttcccccttgtggtcttcgcgtttgcggacgggagagaactttcggccattttccttttagaaatttaacttcttgaaggccaccaggtgacccttacttccctctcacctttccttctacctgtactttctctattaaaaagcctgcagaagtacccttgacaaattgccaaaaatgacacctaaaaaaaaaaaaaggaaaaacgacaccttaggtaattataggttgtaagaaaaagatttgacctcttggagtttttatttcttaataccaaaggacacccaaggaacgtatctctcaaaattgggtttcaaacctcagccgtttccttcttagttccagtgcttaacacgcaacagacctgcacaccactacactgcatacgagttttaaagttaataaatcagtcacccctccatagtcttctacctacttgaagacagaaacggctgctaggaagcaattcttc

SEQ ID NO: 453 - DNA, 1087 bp, synthetic construct
  source 1..1087: mol_type = other DNA
tctccccgcccgcgggcggcgaagtaaaggcccagcgcagcccgcgctcctgccctggagcctcgtctttctccaggaaaacgtggaccgctctccgccgacaggtctcttccacagacccctgtcgccttcgcccccggtctcttccggttctgtcttttcgctggctcgatacgaacaaggaagtcgcccccagcggagccccggctcccccaggcagaggcggccccgggggcggagtcaacggcggaggccacgccctctgtgaaagggcggggcatgcaaattcgaaatgaaagcccgggaacgccggaagaagcacgggtgtaagatttcccttttcaaaggcagagaataagaaatcagcccgagagtgtaagggcgtcaatagcgctgtggacgagacagagggaatggggcaaggagcgaggctggggctctcaccgcgacttgaatgtggatgagagtgggacggtgacggcgggcgcgaaggcgagcgcaatgatagggacttagggtgatagaagtgcaaagcatgactgtcaaatttttggagcaggttttctgacttcggtcggaaaacccctctggggaataagagtggtttaaagaaagaacaatttgagagatctgcttagatctaataaaacccaagtatagtttctttagacgtcttatatctcacgtaggacctcttatttcagactcactgcaagaacaagctaaagaactatatacagtcaggaacaaggtgagccatcgcggttctcagtcccatgatcttaagagtttttcctcttcccctcttccctggctgtcctggagctcactctgtagaccaggctggtctcaaactcagaaatccacttacctctgcctcccaagggctgggattaaaggcatgcaccaccattgcccggcagggtatgtggactatgctgtccttcaactcagagatcgtggtactttaaatctcattttccgaaagaaaagaaaagaaaggaaggggggaaataaagccagtatattttgcacccacaatctgaagttctacaaatattgttagaaaatgcaaaggacccaagtc

SEQ ID NO: 454 - DNA, 1087 bp, synthetic construct
  source 1..1087: mol_type = other DNA
tctccccgcccgcgggcggcgaagtaaaggcccagcgcagcccgcgctcctgccctggagcctcgtctttctccaggaaaacgtggaccgctctccgccgacaggtctcttccacagacccctgtcgccttcgcccccggtctcttccggttctgtcttttcgctggctcgatacgaacaaggaagtcgcccccagcggagccccggctcccccaggcagaggcggccccgggggcggagtcaacggcggaggccacgccctctgtgaaagggcggggcatgcaaattcgaaatgaaagcccgggaacgccggaagaagcacgggtgtaagatttcccttttcaaaggcagagaataagaaatcagcccgagagtgtaagggcgtcaatagcgctgtggacgagacagagggaatggggcaaggagcgaggctggggctctcaccgcgacttgaatgtggatgagagtgggacggtgacggcgggcgcgaaggcgagcgcaatgatagggacttagggtgatagaagtgcaaagcatgactgtcaaatttttggagcaggttttctgacttcggtcggaaaacccctctcggtttatcttaaagggttttaaatatagaaagcttccttagtcttatgggtgagagtgctgtttaagccttacctaggtatgtctttgaacatttattacagattgttatttgtgactatgaccactcaggtgttctgttcttgtgaatttagacacactcagaaaggctacacactcaaagaccacaccaaagtgaagtactatctgggccgtgaaactggtcacatatcagttattttgcagtaaaacaaggaagtcaatcatactgcttcagtgggtcagggagtcaagaatgcacagtacaagagctggtgagattcctcagcaggtaagagcactgaatgctcttccaaagattctgagttcaaatcccagcaaccacgtggtggatttgaacaaaggatgaaaacaaccatccataaccagatctgatgccctcttctggagtgtcaaaagacagctatggtgtacttacataaataaataagtaaaaaca

SEQ ID NO: 455 - DNA, 1087 bp, synthetic construct
  source 1..1087: mol_type = other DNA
tctccccgcccgcgggcggcgaagtaaaggcccagcgcagcccgcgctcctgccctggagcctcgtctttctccaggaaaacgtggaccgctctccgccgacaggtctcttccacagacccctgtcgccttcgcccccggtctcttccggttctgtcttttcgctggctcgatacgaacaaggaagtcgcccccagcggagccccggctcccccaggcagaggcggccccgggggcggagtcaacggcggaggccacgccctctgtgaaagggcggggcatgcaaattcgaaatgaaagcccgggaacgccggaagaagcacgggtgtaagatttcccttttcaaaggcagagaataagaaatcagcccgagagtgtaagggcgtcaatagcgctgtggacgagacagagggaatggggcaaggagcgaggctggggctctcaccgcgacttgaatgtggatgagagtgggacggtgacggcgggcgcgaaggcgagcgcaatgatagggacttagggtgatagaagtgcaaagcatgactgtcaaatttttggagcaggttttctgacttcggtcggaaaacccctccacattttgtgtttaaaaatagaaatatttaagtgagatcagtttaaatctgctttatctagggtgtctaactgcttgcatctttttaacttttccttatttgtgagaaggtctgtaaaacttattatatgttagtacactgtagctgtcttcagacactccagaagagggattcagatcaccttacagatggttttgagccaccatgtggttgctgggatttgaactcaggacctttagaaaagtagttgggtgctcttacccgctgagccatctcaccagccctttttttttcttttttccagttcgggtttctctgtgtgtagccctggctgtcctggaactcattctgtagaccgggctggcctcgaactcagaaatctgcctgcctctgcctcccaagtgctgggattaaaggaatgtgccttcattgcccggctctagggctttttgttgttgtttgtttgtttgtttgtttgtttgcttttgtggatggcct

SEQ ID NO: 456 - DNA, 1087 bp, synthetic construct
  source 1..1087: mol_type = other DNA
tctccccgcccgcgggcggcgaagtaaaggcccagcgcagcccgcgctcctgccctggagcctcgtctttctccaggaaaacgtggaccgctctccgccgacaggtctcttccacagacccctgtcgccttcgcccccggtctcttccggttctgtcttttcgctggctcgatacgaacaaggaagtcgcccccagcggagccccggctcccccaggcagaggcggccccgggggcggagtcaacggcggaggccacgccctctgtgaaagggcggggcatgcaaattcgaaatgaaagcccgggaacgccggaagaagcacgggtgtaagatttcccttttcaaaggcagagaataagaaatcagcccgagagtgtaagggcgtcaatagcgctgtggacgagacagagggaatggggcaaggagcgaggctggggctctcaccgcgacttgaatgtggatgagagtgggacggtgacggcgggcgcgaaggcgagcgcaatgatagggacttagggtgatagaagtgcaaagcatgactgtcaaatttttggagcaggttttctgacttcggtcggaaaacccctaaaaccagtaagggagaaaggtcaagtaacatataaaggaaggcctatcagaattacaccagacttttcaccagagactatgaaagccagaagagcctggacagatgttatacagacactaagagaacacaaatgccagcccaggctactatacctggccaaactctcaattaccatagatggagaaaccaaagtattccacgacaaaaacaaattcacacaatatctttccacgaatccagcccttcaaaggataatgacagaaaagaagcaatacaaggacggaaatcacgccctagaacaaccaagaaactaatcattcaacaaaccaaaaagaagacagccacaagaacagaatgccaactctaacaacaaaaataaaaggaagcaacaattacttttccttaatatctcttaatatcaatggactcaattccccaataaaaagacatagactaacagactggctacacaaacaggacccaacattctgctgctta

SEQ ID NO: 457 - DNA, 1087 bp, synthetic construct
  source 1..1087: mol_type = other DNA
tctccccgcccgcgggcggcgaagtaaaggcccagcgcagcccgcgctcctgccctggagcctcgtctttctccaggaaaacgtggaccgctctccgccgacaggtctcttccacagacccctgtcgccttcgcccccggtctcttccggttctgtcttttcgctggctcgatacgaacaaggaagtcgcccccagcggagccccggctcccccaggcagaggcggccccgggggcggagtcaacggcggaggccacgccctctgtgaaagggcggggcatgcaaattcgaaatgaaagcccgggaacgccggaagaagcacgggtgtaagatttcccttttcaaaggcagagaataagaaatcagcccgagagtgtaagggcgtcaatagcgctgtggacgagacagagggaatggggcaaggagcgaggctggggctctcaccgcgacttgaatgtggatgagagtgggacggtgacggcgggcgcgaaggcgagcgcaatgatagggacttagggtgatagaagtgcaaagcatgactgtcaaatttttggagcaggttttctgacttcggtcggaaaacccctcccaatttcactggtctacaatgaaagcaaaacagttctcttccccgctccccggtgtgtgagaggggctttgatccttctctggtttcctaggaaacgcgtatgtgctagagccacgctctgagacttccgcctcgtgcggtcccgcttcctttctgcctcctctggcctgcatccgtgggggaggtggctggctgcagggttctccggatctcttctgtgttcccactactcaagcaccgagtggcgttctatggcgtccgcctcggctcagcccgcggccctgagcgcggagcaggccaagggtgaggaaagagcctagtctgggtgtgggccgtcttctggggggagggcgcgatactattctttgcctctccaagtggggcccttgcccattagggcgaagggttgggaggacaagcttatcgggttgcttgcaggcctcggcccactaattccctgcctcttccctcctctgggctcgcccgccgtcctccgcg

SEQ ID NO: 458 - DNA, 1087 bp, synthetic construct
  source 1..1087: mol_type = other DNA
tctccccgcccgcgggcggcgaagtaaaggcccagcgcagcccgcgctcctgccctggagcctcgtctttctccaggaaaacgtggaccgctctccgccgacaggtctcttccacagacccctgtcgccttcgcccccggtctcttccggttctgtcttttcgctggctcgatacgaacaaggaagtcgcccccagcggagccccggctcccccaggcagaggcggccccgggggcggagtcaacggcggaggccacgccctctgtgaaagggcggggcatgcaaattcgaaatgaaagcccgggaacgccggaagaagcacgggtgtaagatttcccttttcaaaggcagagaataagaaatcagcccgagagtgtaagggcgtcaatagcgctgtggacgagacagagggaatggggcaaggagcgaggctggggctctcaccgcgacttgaatgtggatgagagtgggacggtgacggcgggcgcgaaggcgagcgcaatgatagggacttagggtgatagaagtgcaaagcatgactgtcaaatttttggagcaggttttctgacttcggtcggaaaacccctgaatttgttaaattacaggaggaagcttttttagttcattttacaaatactttcttgttaggtagataataccttctaaggttattatctggatcttctaagtctttttatcgctagcaagtctaagtttctggactttggaattagaagttaatgtcgtaggcgggcatggtggtccacgcctttaatcccagagtttgggaggcagacgcaggtggttttctgagttcgaggccatcctgctcttcaatgttagttccaggacagccagggttatacaaagaaaccctgtctcgagaaacaaaacaaacaaaaaaagagtagctgagtgctctgagttgtctctccagccccttagctatttattttcatttaaattatttttgttttattcgcttgtgtgcctgagtttgaatttcccgggattaacagttgaagactagggctggtgagatggctcagcggttaagattgccgactgctcttccaaaggtcctgag

SEQ ID NO: 459 - DNA, 1087 bp, synthetic construct
  source 1..1087: mol_type = other DNA
tctccccgcccgcgggcggcgaagtaaaggcccagcgcagcccgcgctcctgccctggagcctcgtctttctccaggaaaacgtggaccgctctccgccgacaggtctcttccacagacccctgtcgccttcgcccccggtctcttccggttctgtcttttcgctggctcgatacgaacaaggaagtcgcccccagcggagccccggctcccccaggcagaggcggccccgggggcggagtcaacggcggaggccacgccctctgtgaaagggcggggcatgcaaattcgaaatgaaagcccgggaacgccggaagaagcacgggtgtaagatttcccttttcaaaggcagagaataagaaatcagcccgagagtgtaagggcgtcaatagcgctgtggacgagacagagggaatggggcaaggagcgaggctggggctctcaccgcgacttgaatgtggatgagagtgggacggtgacggcgggcgcgaaggcgagcgcaatgatagggacttagggtgatagaagtgcaaagcatgactgtcaaatttttggagcaggttttctgacttcggtcggaaaacccctaccccctaattctacaagaatagaaagcttagcagctcctctgaatggttgctctcaggtgctagtggttgcaagtcgtatgttgatgcctgcctttgccctacctggtgtgtgagcgtgagcgcgccccacctctccagcctctctcttactgtttttcagacaagatgggactgttgttctcctactgctatgtacctcaatttcaattgatcatgcctggacataactgcccatgttgtaaggtcgtctacgttgtaaggtcgtgctcagtttctgatgcctagactagtcacctttccgtttgcctcctgactgtgtaaatgaggcaaatgaaggtggtctcttaactgacatgttagtgtttgacctatgggatagtttctcattgttgagacagaatttctagaagctggtccgctgagcggctaagagcacttgctgatattgcaaaggatctacctgggtttggttctcagcactcacatggaagttcacat

SEQ ID NO: 460 - DNA, 654 bp, synthetic construct
  source 1..654: mol_type = other DNA
tctccccgcccgcgggcggcgaagtaaaggcccagcgcagcccgcgctcctgccctggagcctcgtctttctccaggaaaacgtggaccgctctccgccgacaggtctcttccacagacccctgtcgccttcgcccccggtctcttccggttctgtcttttcgctggctcgatacgaacaaggaagtcgcccccagcggagccccggctcccccaggcagaggcggccccgggggcggagtcaacggcggaggccacgccctctgtgaaagggcggggcatgcaaattcgaaatgaaagcccgggaacgccggaagaagcacgggtgtaagatttcccttttcaaaggcagagaataagaaatcagcccgagagtgtaagggcgtcaatagcgctgtggacgagacagagggaatggggcaaggagcgaggctggggctctcaccgcgacttgaatgtggatgagagtgggacggtgacggcgggcgcgaaggcgagcgcaatgatagggacttagggtgatagaagtgcaaagcatgactgtcaaatttttggagcaggttttctgacttcggtcggaaaaccccttgtagttcctgcaatttaattttcgtttaaaactttattttattctttaacttaaaaaaaatatata

SEQ ID NO: 461 - DNA, 533 bp, synthetic construct; identical to SEQ ID NO: 365
  source 1..533: mol_type = other DNA

SEQ ID NO: 462 - DNA, 559 bp, synthetic construct; identical to SEQ ID NO: 366
  source 1..559: mol_type = other DNA

SEQ ID NO: 463 - DNA, 539 bp, synthetic construct; identical to SEQ ID NO: 367
  source 1..539: mol_type = other DNA

SEQ ID NO: 464 - DNA, 533 bp, synthetic construct; identical to SEQ ID NO: 368
  source 1..533: mol_type = other DNA

SEQ ID NO: 465 - DNA, 1087 bp, synthetic construct
  source 1..1087: mol_type = other DNA
ccaacaagagagaccctcatctctacaaaatattttttaaaataactgggcctcatggtgcattcctgtaatctgagctagttgggaggatagctagagcccaggagatcgaggctgcagagaaccgtgatcacacgactgcactccagcctgggtgacagagcaagaccctgtctcaatagatagatagatagatagatagatagatagatagatagatagatagataaaaacagagaggtgaaaaatatggttttaagggttctgtttaagaatactctgttccaacatggagtttgtcaactctaaagtggtaaaaaacaagacagattgtagacattttcataaaaggcaggattatttggtgtcaccaaattaaatatgttaatggtcacagcggaggccgactcaatcagccttttattctgccaggctatttgatactgctgagggcttacctatttcctgaggagaaaaatagtcattaaaatgaccttataaatgatagggacttagggtgatagaagtgcaaagcatgactgtcaaatttttggagcaggttttctgacttcggtcggaaaacccctactttctggagtttcaaaaacagactgtacgccaagggtcatatctttttttgtattggtttgtgtcttggttggtgtcttaggtgttaatcctacagtggagggtttatgggaataggaagtaacatgtcgcctgcatgtcataggagaaaaagcgagcatcagccgtatcggctttgtaacacaaattagctatcgtgaagtccgctcagctcttccctttctaccctggctgctttttgcagggattggtccgtggtctccagtctcttgggttctcaccctgtgtgaaaatcttcgtgtttttccctaccccccagtcacctcttacacagcctctgcttccaagcgcagcccccacaggagtttgtaggatttctgtgctagcggggaatgtgttctcacctcatagagccaggtagaaattatgcagatgggcagttctctgggaagaaagcagggcctttggggctctcagtgtccccgttgggttgtagaca

SEQ ID NO: 466 - DNA, 1087 bp, synthetic construct
  source 1..1087: mol_type = other DNA
ccaacaagagagaccctcatctctacaaaatattttttaaaataactgggcctcatggtgcattcctgtaatctgagctagttgggaggatagctagagcccaggagatcgaggctgcagagaaccgtgatcacacgactgcactccagcctgggtgacagagcaagaccctgtctcaatagatagatagatagatagatagatagatagatagatagatagatagataaaaacagagaggtgaaaaatatggttttaagggttctgtttaagaatactctgttccaacatggagtttgtcaactctaaagtggtaaaaaacaagacagattgtagacattttcataaaaggcaggattatttggtgtcaccaaattaaatatgttaatggtcacagcggaggccgactcaatcagccttttattctgccaggctatttgatactgctgagggcttacctatttcctgaggagaaaaatagtcattaaaatgaccttataaatgatagggacttagggtgatagaagtgcaaagcatgactgtcaaatttttggagcaggttttctgacttcggtcggaaaacccctactttctggagtttctaaaagtagactgtacgctaagggtcatatctttttttgttttggtttgtgtcttggttggcgtcttaaatgttaatcctacagtggagggctggcgaataggaagtaacatgtcgcctgcacgccataggagaaaaagcgagcatcagccgtatcggctttgtaacacaaattagctatcgtgaagtccgctcagctcttccctttctaccctggctgctttttgcagggattggtccgtggtctccagtctcttgggttctcaccctgtgtgaaaatcttcctgtttttccctaccccccaagtcacctcttacacagcctctgcttccaagcgcagcccccacaggagtttgtaggatttctgtgctagcggggagtgtgttctcacctcatagagccaggtagaaactacgcagatgggtgctgttctccaggaagaaagcagggcctttggggctctcagtgtccccgttgggttgtaga

SEQ ID NO: 467 - DNA, 1087 bp, synthetic construct
  source 1..1087: mol_type = other DNA
ccaacaagagagaccctcatctctacaaaatattttttaaaataactgggcctcatggtgcattcctgtaatctgagctagttgggaggatagctagagcccaggagatcgaggctgcagagaaccgtgatcacacgactgcactccagcctgggtgacagagcaagaccctgtctcaatagatagatagatagatagatagatagatagatagatagatagatagataaaaacagagaggtgaaaaatatggttttaagggttctgtttaagaatactctgttccaacatggagtttgtcaactctaaagtggtaaaaaacaagacagattgtagacattttcataaaaggcaggattatttggtgtcaccaaattaaatatgttaatggtcacagcggaggccgactcaatcagccttttattctgccaggctatttgatactgctgagggcttacctatttcctgaggagaaaaatagtcattaaaatgaccttataaatgatagggacttagggtgatagaagtgcaaagcatgactgtcaaatttttggagcaggttttctgacttcggtcggaaaacccctactttctggagtttcaaaaacagaccgtacgccaagggtcatgtcttttttcgtattggtttgtgtcttagttgttaatcctacagtggaggcctggggaataagaagtaacatgtggcctgcacgccataggagaaaaagcgagcatcagccgtatcggctttgtaacacaaattagctatcgtgaagtccgctcagctcttccatttctaccctggctgctttttgcagggattggtccgtggtctccagtctcttgggttctcaccctgtgtgaaaatcttcgtgtttttccctaccccccaagtcacctcttacacagcctctgcttccaagcgcagcccccacaggagtttgtaggatttctgtgctagcggggagtgtgttctcacctcatagagccaggtagaaattatgcagatgggcgctgttctctgggaagaaagcagggcctttggggctctcagtgtccccgttgggttgtagacataacactctta

SEQ ID NO: 468 - DNA, 891 bp, synthetic construct
  source 1..891: mol_type = other DNA
ccaacaagagagaccctcatctctacaaaatattttttaaaataactgggcctcatggtgcattcctgtaatctgagctagttgggaggatagctagagcccaggagatcgaggctgcagagaaccgtgatcacacgactgcactccagcctgggtgacagagcaagaccctgtctcaatagatagatagatagatagatagatagatagatagatagatagatagataaaaacagagaggtgaaaaatatggttttaagggttctgtttaagaatactctgttccaacatggagtttgtcaactctaaagtggtaaaaaacaagacagattgtagacattttcataaaaggcaggattatttggtgtcaccaaattaaatatgttaatggtcacagcggaggccgactcaatcagccttttattctgccaggctatttgatactgctgagggcttacctatttcctgaggagaaaaatagtcattaaaatgaccttataaatgatagggacttagggtgatagaagtgcaaagcatgactgtcaaatttttggagcaggttttctgacttcggtcggaaaacccctcctccggggatacaacgtgtttcctaaaagtagagggaggtaagagacggtagcacctgcggggcggcttgcacgccgagtgcctgtgacgcgccggcttaacttaactgcttccctgaagtaccttgaggttcctgatgtgcgggcggtagacggtaggcttatgcggcacgctgtcgtttccaccgtggctactgcgctttgggaaggccacgacctcctcctttggggaggtccttaggatctcagcttggcagtcgagtgggtggcgaccttttaaaggaatgggacccacccggagttc

SEQ ID NO: 469 - DNA, 1079 bp, synthetic construct
  source 1..1079: mol_type = other DNA
ccaacaagagagaccctcatctctacaaaatattttttaaaataactgggcctcatggtgcattcctgtaatctgagctagttgggaggatagctagagcccaggagatcgaggctgcagagaaccgtgatcacacgactgcactccagcctgggtgacagagcaagaccctgtctcaatagatagatagatagatagatagatagatagatagatagatagatagataaaaacagagaggtgaaaaatatggttttaagggttctgtttaagaatactctgttccaacatggagtttgtcaactctaaagtggtaaaaaacaagacagattgtagacattttcataaaaggcaggattatttggtgtcaccaaattaaatatgttaatggtcacagcggaggccgactcaatcagccttttattctgccaggctatttgatactgctgagggcttacctatttcctgaggagaaaaatagtcattaaaatgaccttataaatgatagggacttagggtgatagaagtgcaaagcatgactgtcaaatttttggagcaggttttctgacttcggtcggaaaacccctttcccttcttgtaatacaaaataataacaaccacagaggacatcgcaagtaaaatgtgtataacaaccccatctaaagaaccctatcatctttctactatctgtctacctaaatatgtatagtataaataaccctatatagcactctaagcaacttaagttaggtaacttagaaaactcttttttttttttgagactgagtctcactctgtcgcacccaggctggagtgcagtggcgtgatctcggctcactgcaacctccaccttctgggttcaagtgattctcccatctcagtctcccaagtagctgggattacaggcacgccaccatgccctgctacatttttttttttttagtagagatgaggtttcaccacattggccaggctgttctcgaactcctgacctcaggtgatccgcccaccttggcctcatgaagtgctgggattacaggtgtgagccactgtacccagccagaaaactcttaaaaaac

SEQ ID NO: 470 - DNA, 969 bp, synthetic construct
  source 1..969: mol_type = other DNA
ccaacaagagagaccctcatctctacaaaatattttttaaaataactgggcctcatggtgcattcctgtaatctgagctagttgggaggatagctagagcccaggagatcgaggctgcagagaaccgtgatcacacgactgcactccagcctgggtgacagagcaagaccctgtctcaatagatagatagatagatagatagatagatagatagatagatagatagataaaaacagagaggtgaaaaatatggttttaagggttctgtttaagaatactctgttccaacatggagtttgtcaactctaaagtggtaaaaaacaagacagattgtagacattttcataaaaggcaggattatttggtgtcaccaaattaaatatgttaatggtcacagcggaggccgactcaatcagccttttattctgccaggctatttgatactgctgagggcttacctatttcctgaggagaaaaatagtcattaaaatgaccttataaatgatagggacttagggtgatagaagtgcaaagcatgactgtcaaatttttggagcaggttttctgacttcggtcggaaaacccctctgaattttcttgcagttgaacaacagaggctttttttgtgtgtgtgggggtgcttggttttgggaggttgaagagtacttgttcgcaaactctctaaatgagagatggggaagtgtcttaccagctgattcgcgagagcacctgcaagtttacctgttttagtgatttgcgtttatgaaagttggagttgctgattttgtgatctctacttttaaggtaaaagcagggcggtgttgacttttcttgccagttggctgtcctgttttctttctcgcactgttttctttttgagacgaagtctgtcgctcaggctggagtgcactggcgtgatctcggctcgctgcaaactttgccgaacccctgtttagcgatttccgtttg

SEQ ID NO: 471 - DNA, 1087 bp, synthetic construct
  source 1..1087: mol_type = other DNA
ccaacaagagagaccctcatctctacaaaatattttttaaaataactgggcctcatggtgcattcctgtaatctgagctagttgggaggatagctagagcccaggagatcgaggctgcagagaaccgtgatcacacgactgcactccagcctgggtgacagagcaagaccctgtctcaatagatagatagatagatagatagatagatagatagatagatagatagataaaaacagagaggtgaaaaatatggttttaagggttctgtttaagaatactctgttccaacatggagtttgtcaactctaaagtggtaaaaaacaagacagattgtagacattttcataaaaggcaggattatttggtgtcaccaaattaaatatgttaatggtcacagcggaggccgactcaatcagccttttattctgccaggctatttgatactgctgagggcttacctatttcctgaggagaaaaatagtcattaaaatgaccttataaatgatagggacttagggtgatagaagtgcaaagcatgactgtcaaatttttggagcaggttttctgacttcggtcggaaaacccctatatgtggtaatccaacaatagaaattatttttaagtttgtgtgttcctttttctgttcaatggtgcttttgatattgttgtaaagcagtgactagcagattctgtgtggtaaaagcactgaaccctgtttagttcttttctccctaccttattggtaattatttctgtgtatatatgttccaaagaaatgcggcttgtatattcatgcttttcaactttttgtgatagacagttgatacacaagtagtacctcctccgggatcttcttagtcaagactgtttggtagatgcatgttttttgttacttgtaatgtacagtattcagttcattttctttttgcagcactgtccggttgaaacacaacgcgaggatcgggcgtggtggctcacgcctgtaatcccagcactttgggaggccgaggcaggacaatcaagaccaatcctggtcatcaaggcaggagaatcaagaccatcgaggtcaggagatcaagaccatcct

SEQ ID NO: 472 - DNA, 1085 bp, synthetic construct
  source 1..1085: mol_type = other DNA
ccaacaagagagaccctcatctctacaaaatattttttaaaataactgggcctcatggtgcattcctgtaatctgagctagttgggaggatagctagagcccaggagatcgaggctgcagagaaccgtgatcacacgactgcactccagcctgggtgacagagcaagaccctgtctcaatagatagatagatagatagatagatagatagatagatagatagatagataaaaacagagaggtgaaaaatatggttttaagggttctgtttaagaatactctgttccaacatggagtttgtcaactctaaagtggtaaaaaacaagacagattgtagacattttcataaaaggcaggattatttggtgtcaccaaattaaatatgttaatggtcacagcggaggccgactcaatcagccttttattctgccaggctatttgatactgctgagggcttacctatttcctgaggagaaaaatagtcattaaaatgaccttataaatgatagggacttagggtgatagaagtgcaaagcatgactgtcaaatttttggagcaggttttctgacttcggtcggaaaacccctacatcaggttgtttttctgtttttacatcaggttgtttttctgtttggttttttttttacaccacgtttatacgccggtgcacggtttaccactgaaaacacctttcatctacaggtgatatcttttaacacaaataaaatgtagtagtcctaggagacggaatagaaggaggtggggcctaggcagattcatctctgcggtgcattttgcctctggccctcgggccctagtttgcgatctttcccatcttgcctctgcttccctctgcacaatcctgagtattgcagtaccttacacttaaggaaatttcgtcttgccaaagttgatccatttcagctccgaaacataacaggaactagtgcaacgataaacgtatgaggaacttgcaataagagtgacagaatcctttgaatcaaaaaaaaaaaaagccaccacttaatgagtatctaccatatgtcaagggcttcaccaatatttcattgaaatattccagacca

SEQ ID NO: 473 - DNA, 1087 bp, synthetic construct
  source 1..1087: mol_type = other DNA
ccaacaagagagaccctcatctctacaaaatattttttaaaataactgggcctcatggtgcattcctgtaatctgagctagttgggaggatagctagagcccaggagatcgaggctgcagagaaccgtgatcacacgactgcactccagcctgggtgacagagcaagaccctgtctcaatagatagatagatagatagatagatagatagatagatagatagatagataaaaacagagaggtgaaaaatatggttttaagggttctgtttaagaatactctgttccaacatggagtttgtcaactctaaagtggtaaaaaacaagacagattgtagacattttcataaaaggcaggattatttggtgtcaccaaattaaatatgttaatggtcacagcggaggccgactcaatcagccttttattctgccaggctatttgatactgctgagggcttacctatttcctgaggagaaaaatagtcattaaaatgaccttataaatgatagggacttagggtgatagaagtgcaaagcatgactgtcaaatttttggagcaggttttctgacttcggtcggaaaacccctcttatgatgtttgttgccaatgatagattgttttcactgtgcaaaaattatgggtagttttggtggtcttgatgcagttgtaagcttggggtatgaaggtttgggccacgcctgggcgcttccggctgcgccggatgctgtttcctttccgctcccaggggcgttgggaacggttgtaggacgtggctctttattcgtgagttttccatttacctccgctgaacctagagcttcagacgccctatggcgtccgcctcgacccaaccggcggccttgagcgctgagcaagcaaagggtgagaatcgtcctagtcaaggcataggctgctggcctggggtagtcaaggcatgggctgctggtctggggaggatgcgggcggaggatgtggggcgacaaacctggctacgtccgccgggaaaatggggtaggggacgccgggtaccgtccttctaagtggggcgcttgcccccaagacttgggatcttattgggttacctaca

SEQ ID NO: 474 - DNA, 1085 bp, synthetic construct
  source 1..1085: mol_type = other DNA
ccaacaagagagaccctcatctctacaaaatattttttaaaataactgggcctcatggtgcattcctgtaatctgagctagttgggaggatagctagagcccaggagatcgaggctgcagagaaccgtgatcacacgactgcactccagcctgggtgacagagcaagaccctgtctcaatagatagatagatagatagatagatagatagatagatagatagatagataaaaacagagaggtgaaaaatatggttttaagggttctgtttaagaatactctgttccaacatggagtttgtcaactctaaagtggtaaaaaacaagacagattgtagacattttcataaaaggcaggattatttggtgtcaccaaattaaatatgttaatggtcacagcggaggccgactcaatcagccttttattctgccaggctatttgatactgctgagggcttacctatttcctgaggagaaaaatagtcattaaaatgaccttataaatgatagggacttagggtgatagaagtgcaaagcatgactgtcaaatttttggagcaggttttctgacttcggtcggaaaaccccttctttactgttatatgttaggcgaaatattacgcgtttggagtaagtggtgctttttgtaactgaaaagagattctgtgtgtgtttttttttttttagaggctgcatagttatttgtatgaaccgcaggtgacctaattagcaaggtaattcagacctgtatcctagcacttaagaagtggaagtgggataaccctgcgtgttctcgtgtgggaggctagcttaagcaacaaagcaggaaggccccaccaacaaaagaatttaaaaattatacgtgcgtggtggcgcgcgtatgaggaaattatttggcaactgtgttacagtatagcagcaaatggaatagacctagtccctgactttaggagacctgcctcagccccccgaatggctgggactacaggcgtgcgcctccgcgcccagctaatttttgcatttttggtagagacgggttcaccatgttggccaggatggtctccatctcttcatctggtgatccgcc

SEQ ID NO: 475 - DNA, 1087 bp, synthetic construct
  source 1..1087: mol_type = other DNA
ccaacaagagagaccctcatctctacaaaatattttttaaaataactgggcctcatggtgcattcctgtaatctgagctagttgggaggatagctagagcccaggagatcgaggctgcagagaaccgtgatcacacgactgcactccagcctgggtgacagagcaagaccctgtctcaatagatagatagatagatagatagatagatagatagatagatagatagataaaaacagagaggtgaaaaatatggttttaagggttctgtttaagaatactctgttccaacatggagtttgtcaactctaaagtggtaaaaaacaagacagattgtagacattttcataaaaggcaggattatttggtgtcaccaaattaaatatgttaatggtcacagcggaggccgactcaatcagccttttattctgccaggctatttgatactgctgagggcttacctatttcctgaggagaaaaatagtcattaaaatgaccttataaatgatagggacttagggtgatagaagtgcaaagcatgactgtcaaatttttggagcaggttttctgacttcggtcggaaaacccctaccttattcacgcctaaaaagtagactgactgtggggtggtcgtgttttttgtttcttgttggtaggtggtgaatgcgtttttttcgttgttttctccgttactcaggctgccagttgcttggcagtcttgtcgctggctgtggacgctctgcacttcatcaccgtccccagctgcgctttgagccggtctaaggttgcccacagtattgacgttgggacccacgaaactggcaatttccatgtgtgcggccttacccagttctcccaaacttctgcgtataaccgcttctctgtgcttcagaaagataagtccggccccggcctcacacagcagctcagttcgtgacagcgtttaatatgtaaaatggagcaaataatttatagggcgttgggagagttaaagagactaattcatttacgtgttaaatacagggaatggcttttgcattgatataaccccagcctccagcatgcgccagacctgacgtaggtgttcggc

SEQ ID NO: 476 - DNA, 1087 bp, synthetic construct
  source 1..1087: mol_type = other DNA
ccaacaagagagaccctcatctctacaaaatattttttaaaataactgggcctcatggtgcattcctgtaatctgagctagttgggaggatagctagagcccaggagatcgaggctgcagagaaccgtgatcacacgactgcactccagcctgggtgacagagcaagaccctgtctcaatagatagatagatagatagatagatagatagatagatagatagatagataaaaacagagaggtgaaaaatatggttttaagggttctgtttaagaatactctgttccaacatggagtttgtcaactctaaagtggtaaaaaacaagacagattgtagacattttcataaaaggcaggattatttggtgtcaccaaattaaatatgttaatggtcacagcggaggccgactcaatcagccttttattctgccaggctatttgatactgctgagggcttacctatttcctgaggagaaaaatagtcattaaaatgaccttataaatgatagggacttagggtgatagaagtgcaaagcatgactgtcaaatttttggagcaggttttctgacttcggtcggaaaaccccttttgacccattacccatctaagttagatgcttttttaaatgttttttaatttttaaatttttaatttttttcattatttattttttatttttgagacggatctcggctcactgtaacctccacctcccgggttcaagcgattctcctgactcagcctcccgagtagctgggattacaggcgcgcgccaccatgcccggctaatttttctatttttagtaaagacggggtttcgccatgttgaccagggtggtcttgaactcctgacgtcaggtgatcctcctgcctcgtgctgggattgcaggcgtgagccaccgctcccggcccttagatgctttttaatcagcaagtacgcaatgctttcctgacaggaatgtcaagtccgtcaggaaatccacataagggtgttaagcaggcaaagtaccacatacagattaaaatcaaaagcactgtcaacgcttatttaatttatacagtagaccctaacttttctaattttgtg

SEQ ID NO: 477 - DNA, 1087 bp, synthetic construct
  source 1..1087: mol_type = other DNA
ccaacaagagagaccctcatctctacaaaatattttttaaaataactgggcctcatggtgcattcctgtaatctgagctagttgggaggatagctagagcccaggagatcgaggctgcagagaaccgtgatcacacgactgcactccagcctgggtgacagagcaagaccctgtctcaatagatagatagatagatagatagatagatagatagatagatagatagataaaaacagagaggtgaaaaatatggttttaagggttctgtttaagaatactctgttccaacatggagtttgtcaactctaaagtggtaaaaaacaagacagattgtagacattttcataaaaggcaggattatttggtgtcaccaaattaaatatgttaatggtcacagcggaggccgactcaatcagccttttattctgccaggctatttgatactgctgagggcttacctatttcctgaggagaaaaatagtcattaaaatgaccttataaatgatagggacttagggtgatagaagtgcaaagcatgactgtcaaatttttggagcaggttttctgacttcggtcggaaaacccctgtttacttggttttaaaaatagcttgcactagcgataccgcgaatatggttattaggtttgttaggcacagtcgtgtcttactatagaaaaataacgtagtgttcattttgctgcctgtatgtgttaatttgtccttattgcgccattgttcttgttaagtcttctgtaaggagttgcgggtttcaaactgtcagtctgagagcataagctcacttttcagtcagttgaattgaatgttacattcgattggttctggatattgatattacccaaggcttgtcctgtttgtaagtcttttcctacacctgacaatatgattatgtttacaatgtccctagaactctgggtgtatcgttcccactgaataaaatttgatctctaagttgacctataaatttaagtaccaaaaaactggtttgtaagattttggaaggcagaggcagggaagagaccaacgtggtctacatataaagtaccaggtacatataaagtaccaggt

SEQ ID NO: 478 - DNA, 1083 bp, synthetic construct
  source 1..1083: mol_type = other DNA
ccaacaagagagaccctcatctctacaaaatattttttaaaataactgggcctcatggtgcattcctgtaatctgagctagttgggaggatagctagagcccaggagatcgaggctgcagagaaccgtgatcacacgactgcactccagcctgggtgacagagcaagaccctgtctcaatagatagatagatagatagatagatagatagatagatagatagatagataaaaacagagaggtgaaaaatatggttttaagggttctgtttaagaatactctgttccaacatggagtttgtcaactctaaagtggtaaaaaacaagacagattgtagacattttcataaaaggcaggattatttggtgtcaccaaattaaatatgttaatggtcacagcggaggccgactcaatcagccttttattctgccaggctatttgatactgctgagggcttacctatttcctgaggagaaaaatagtcattaaaatgaccttataaatgatagggacttagggtgatagaagtgcaaagcatgactgtcaaatttttggagcaggttttctgacttcggtcggaaaacccctatttttgtggtgctaaaagttagattgcattccgcccttctcacgtctctttacgtgttgtttgcgaggcgtggcctcggaggtaaatggtctccttttacctcagataagcttacctttgctctgtgagtaagaatgtagctacacttccaaatttagctattgtcctttgcggtccaaatgaaaatattaccttccgatctaacaatgttaaactagtcccaggcccttctatcgattgccagaatagactagactactacacagacacaccctctcaaatcaggccagctcctgcaacctgcacctacagtttgtcccctgggacaaatgaaaggacaggccctctttcccccccccccccaaatcagagcacacacagatcttggggtctggggcagaaatttcgttcatggaaaaaacaaacaaacaaacaaacacgatcaaaggaagctcgttccctttggcctcagggtttcttagacgccgtgttccc

SEQ ID NO: 479 - DNA, 1084 bp, synthetic construct
  source 1..1084: mol_type = other DNA
ccaacaagagagaccctcatctctacaaaatattttttaaaataactgggcctcatggtgcattcctgtaatctgagctagttgggaggatagctagagcccaggagatcgaggctgcagagaaccgtgatcacacgactgcactccagcctgggtgacagagcaagaccctgtctcaatagatagatagatagatagatagatagatagatagatagatagatagataaaaacagagaggtgaaaaatatggttttaagggttctgtttaagaatactctgttccaacatggagtttgtcaactctaaagtggtaaaaaacaagacagattgtagacattttcataaaaggcaggattatttggtgtcaccaaattaaatatgttaatggtcacagcggaggccgactcaatcagccttttattctgccaggctatttgatactgctgagggcttacctatttcctgaggagaaaaatagtcattaaaatgaccttataaatgatagggacttagggtgatagaagtgcaaagcatgactgtcaaatttttggagcaggttttctgacttcggtcggaaaacccctataactggtaaccaaaagcagattactttcccccttgtggtcttcgcgtttgcggacgggagagaactttcggccattttccttttagaaatttaacttcttgaaggccaccaggtgacccttacttccctctcacctttccttctacctgtactttctctattaaaaagcctgcagaagtacccttgacaaattgccaaaaatgacacctaaaaaaaaaaaaaggaaaaacgacaccttaggtaattataggttgtaagaaaaagatttgacctcttggagtttttatttcttaataccaaaggacacccaaggaacgtatctctcaaaattgggtttcaaacctcagccgtttccttcttagttccagtgcttaacacgcaacagacctgcacaccactacactgcatacgagttttaaagttaataaatcagtcacccctccatagtcttctacctacttgaagacagaaacggctgctaggaagcaattcttc

SEQ ID NO: 480 - DNA, 1087 bp, synthetic construct
  source 1..1087: mol_type = other DNA
ccaacaagagagaccctcatctctacaaaatattttttaaaataactgggcctcatggtgcattcctgtaatctgagctagttgggaggatagctagagcccaggagatcgaggctgcagagaaccgtgatcacacgactgcactccagcctgggtgacagagcaagaccctgtctcaatagatagatagatagatagatagatagatagatagatagatagatagataaaaacagagaggtgaaaaatatggttttaagggttctgtttaagaatactctgttccaacatggagtttgtcaactctaaagtggtaaaaaacaagacagattgtagacattttcataaaaggcaggattatttggtgtcaccaaattaaatatgttaatggtcacagcggaggccgactcaatcagccttttattctgccaggctatttgatactgctgagggcttacctatttcctgaggagaaaaatagtcattaaaatgaccttataaatgatagggacttagggtgatagaagtgcaaagcatgactgtcaaatttttggagcaggttttctgacttcggtcggaaaacccctctggggaataagagtggtttaaagaaagaacaatttgagagatctgcttagatctaataaaacccaagtatagtttctttagacgtcttatatctcacgtaggacctcttatttcagactcactgcaagaacaagctaaagaactatatacagtcaggaacaaggtgagccatcgcggttctcagtcccatgatcttaagagtttttcctcttcccctcttccctggctgtcctggagctcactctgtagaccaggctggtctcaaactcagaaatccacttacctctgcctcccaagggctgggattaaaggcatgcaccaccattgcccggcagggtatgtggactatgctgtccttcaactcagagatcgtggtactttaaatctcattttccgaaagaaaagaaaagaaaggaaggggggaaataaagccagtatattttgcacccacaatctgaagttctacaaatattgttagaaaatgcaaaggacccaagtc

SEQ ID NO: 481 - DNA, 1087 bp, synthetic construct
  source 1..1087: mol_type = other DNA
ccaacaagagagaccctcatctctacaaaatattttttaaaataactgggcctcatggtgcattcctgtaatctgagctagttgggaggatagctagagcccaggagatcgaggctgcagagaaccgtgatcacacgactgcactccagcctgggtgacagagcaagaccctgtctcaatagatagatagatagatagatagatagatagatagatagatagatagataaaaacagagaggtgaaaaatatggttttaagggttctgtttaagaatactctgttccaacatggagtttgtcaactctaaagtggtaaaaaacaagacagattgtagacattttcataaaaggcaggattatttggtgtcaccaaattaaatatgttaatggtcacagcggaggccgactcaatcagccttttattctgccaggctatttgatactgctgagggcttacctatttcctgaggagaaaaatagtcattaaaatgaccttataaatgatagggacttagggtgatagaagtgcaaagcatgactgtcaaatttttggagcaggttttctgacttcggtcggaaaacccctctcggtttatcttaaagggttttaaatatagaaagcttccttagtcttatgggtgagagtgctgtttaagccttacctaggtatgtctttgaacatttattacagattgttatttgtgactatgaccactcaggtgttctgttcttgtgaatttagacacactcagaaaggctacacactcaaagaccacaccaaagtgaagtactatctgggccgtgaaactggtcacatatcagttattttgcagtaaaacaaggaagtcaatcatactgcttcagtgggtcagggagtcaagaatgcacagtacaagagctggtgagattcctcagcaggtaagagcactgaatgctcttccaaagattctgagttcaaatcccagcaaccacgtggtggatttgaacaaaggatgaaaacaaccatccataaccagatctgatgccctcttctggagtgtcaaaagacagctatggtgtacttacataaataaataagtaaaaaca

SEQ ID NO: 482 - DNA, 1087 bp, synthetic construct
  source 1..1087: mol_type = other DNA
ccaacaagagagaccctcatctctacaaaatattttttaaaataactgggcctcatggtgcattcctgtaatctgagctagttgggaggatagctagagcccaggagatcgaggctgcagagaaccgtgatcacacgactgcactccagcctgggtgacagagcaagaccctgtctcaatagatagatagatagatagatagatagatagatagatagatagatagataaaaacagagaggtgaaaaatatggttttaagggttctgtttaagaatactctgttccaacatggagtttgtcaactctaaagtggtaaaaaacaagacagattgtagacattttcataaaaggcaggattatttggtgtcaccaaattaaatatgttaatggtcacagcggaggccgactcaatcagccttttattctgccaggctatttgatactgctgagggcttacctatttcctgaggagaaaaatagtcattaaaatgaccttataaatgatagggacttagggtgatagaagtgcaaagcatgactgtcaaatttttggagcaggttttctgacttcggtcggaaaacccctccacattttgtgtttaaaaatagaaatatttaagtgagatcagtttaaatctgctttatctagggtgtctaactgcttgcatctttttaacttttccttatttgtgagaaggtctgtaaaacttattatatgttagtacactgtagctgtcttcagacactccagaagagggattcagatcaccttacagatggttttgagccaccatgtggttgctgggatttgaactcaggacctttagaaaagtagttgggtgctcttacccgctgagccatctcaccagccctttttttttcttttttccagttcgggtttctctgtgtgtagccctggctgtcctggaactcattctgtagaccgggctggcctcgaactcagaaatctgcctgcctctgcctcccaagtgctgggattaaaggaatgtgccttcattgcccggctctagggctttttgttgttgtttgtttgtttgtttgtttgtttgcttttgtggatggcct

SEQ ID NO: 483 - DNA, 1087 bp, synthetic construct
  source 1..1087: mol_type = other DNA
ccaacaagagagaccctcatctctacaaaatattttttaaaataactgggcctcatggtgcattcctgtaatctgagctagttgggaggatagctagagcccaggagatcgaggctgcagagaaccgtgatcacacgactgcactccagcctgggtgacagagcaagaccctgtctcaatagatagatagatagatagatagatagatagatagatagatagatagataaaaacagagaggtgaaaaatatggttttaagggttctgtttaagaatactctgttccaacatggagtttgtcaactctaaagtggtaaaaaacaagacagattgtagacattttcataaaaggcaggattatttggtgtcaccaaattaaatatgttaatggtcacagcggaggccgactcaatcagccttttattctgccaggctatttgatactgctgagggcttacctatttcctgaggagaaaaatagtcattaaaatgaccttataaatgatagggacttagggtgatagaagtgcaaagcatgactgtcaaatttttggagcaggttttctgacttcggtcggaaaacccctaaaaccagtaagggagaaaggtcaagtaacatataaaggaaggcctatcagaattacaccagacttttcaccagagactatgaaagccagaagagcctggacagatgttatacagacactaagagaacacaaatgccagcccaggctactatacctggccaaactctcaattaccatagatggagaaaccaaagtattccacgacaaaaacaaattcacacaatatctttccacgaatccagcccttcaaaggataatgacagaaaagaagcaatacaaggacggaaatcacgccctagaacaaccaagaaactaatcattcaacaaaccaaaaagaagacagccacaagaacagaatgccaactctaacaacaaaaataaaaggaagcaacaattacttttccttaatatctcttaatatcaatggactcaattccccaataaaaagacatagactaacagactggctacacaaacaggacccaacattctgctgctta

SEQ ID NO: 484 - DNA, 1087 bp, synthetic construct
  source 1..1087: mol_type = other DNA
ccaacaagagagaccctcatctctacaaaatattttttaaaataactgggcctcatggtgcattcctgtaatctgagctagttgggaggatagctagagcccaggagatcgaggctgcagagaaccgtgatcacacgactgcactccagcctgggtgacagagcaagaccctgtctcaatagatagatagatagatagatagatagatagatagatagatagatagataaaaacagagaggtgaaaaatatggttttaagggttctgtttaagaatactctgttccaacatggagtttgtcaactctaaagtggtaaaaaacaagacagattgtagacattttcataaaaggcaggattatttggtgtcaccaaattaaatatgttaatggtcacagcggaggccgactcaatcagccttttattctgccaggctatttgatactgctgagggcttacctatttcctgaggagaaaaatagtcattaaaatgaccttataaatgatagggacttagggtgatagaagtgcaaagcatgactgtcaaatttttggagcaggttttctgacttcggtcggaaaacccctcccaatttcactggtctacaatgaaagcaaaacagttctcttccccgctccccggtgtgtgagaggggctttgatccttctctggtttcctaggaaacgcgtatgtgctagagccacgctctgagacttccgcctcgtgcggtcccgcttcctttctgcctcctctggcctgcatccgtgggggaggtggctggctgcagggttctccggatctcttctgtgttcccactactcaagcaccgagtggcgttctatggcgtccgcctcggctcagcccgcggccctgagcgcggagcaggccaagggtgaggaaagagcctagtctgggtgtgggccgtcttctggggggagggcgcgatactattctttgcctctccaagtggggcccttgcccattagggcgaagggttgggaggacaagcttatcgggttgcttgcaggcctcggcccactaattccctgcctcttccctcctctgggctcgcccgccgtcctccgcg

SEQ ID NO: 485 - DNA, 1087 bp, synthetic construct
  source 1..1087: mol_type = other DNA
ccaacaagagagaccctcatctctacaaaatattttttaaaataactgggcctcatggtgcattcctgtaatctgagctagttgggaggatagctagagcccaggagatcgaggctgcagagaaccgtgatcacacgactgcactccagcctgggtgacagagcaagaccctgtctcaatagatagatagatagatagatagatagatagatagatagatagatagataaaaacagagaggtgaaaaatatggttttaagggttctgtttaagaatactctgttccaacatggagtttgtcaactctaaagtggtaaaaaacaagacagattgtagacattttcataaaaggcaggattatttggtgtcaccaaattaaatatgttaatggtcacagcggaggccgactcaatcagccttttattctgccaggctatttgatactgctgagggcttacctatttcctgaggagaaaaatagtcattaaaatgaccttataaatgatagggacttagggtgatagaagtgcaaagcatgactgtcaaatttttggagcaggttttctgacttcggtcggaaaacccctgaatttgttaaattacaggaggaagcttttttagttcattttacaaatactttcttgttaggtagataataccttctaaggttattatctggatcttctaagtctttttatcgctagcaagtctaagtttctggactttggaattagaagttaatgtcgtaggcgggcatggtggtccacgcctttaatcccagagtttgggaggcagacgcaggtggttttctgagttcgaggccatcctgctcttcaatgttagttccaggacagccagggttatacaaagaaaccctgtctcgagaaacaaaacaaacaaaaaaagagtagctgagtgctctgagttgtctctccagccccttagctatttattttcatttaaattatttttgttttattcgcttgtgtgcctgagtttgaatttcccgggattaacagttgaagactagggctggtgagatggctcagcggttaagattgccgactgctcttccaaaggtcctgag

SEQ ID NO: 486 - DNA, 1087 bp, synthetic construct
  source 1..1087: mol_type = other DNA
ccaacaagagagaccctcatctctacaaaatattttttaaaataactgggcctcatggtgcattcctgtaatctgagctagttgggaggatagctagagcccaggagatcgaggctgcagagaaccgtgatcacacgactgcactccagcctgggtgacagagcaagaccctgtctcaatagatagatagatagatagatagatagatagatagatagatagatagataaaaacagagaggtgaaaaatatggttttaagggttctgtttaagaatactctgttccaacatggagtttgtcaactctaaagtggtaaaaaacaagacagattgtagacattttcataaaaggcaggattatttggtgtcaccaaattaaatatgttaatggtcacagcggaggccgactcaatcagccttttattctgccaggctatttgatactgctgagggcttacctatttcctgaggagaaaaatagtcattaaaatgaccttataaatgatagggacttagggtgatagaagtgcaaagcatgactgtcaaatttttggagcaggttttctgacttcggtcggaaaacccctaccccctaattctacaagaatagaaagcttagcagctcctctgaatggttgctctcaggtgctagtggttgcaagtcgtatgttgatgcctgcctttgccctacctggtgtgtgagcgtgagcgcgccccacctctccagcctctctcttactgtttttcagacaagatgggactgttgttctcctactgctatgtacctcaatttcaattgatcatgcctggacataactgcccatgttgtaaggtcgtctacgttgtaaggtcgtgctcagtttctgatgcctagactagtcacctttccgtttgcctcctgactgtgtaaatgaggcaaatgaaggtggtctcttaactgacatgttagtgtttgacctatgggatagtttctcattgttgagacagaatttctagaagctggtccgctgagcggctaagagcacttgctgatattgcaaaggatctacctgggtttggttctcagcactcacatggaagttcacat

SEQ ID NO: 487 - DNA, 654 bp, synthetic construct
  source 1..654: mol_type = other DNA
ccaacaagagagaccctcatctctacaaaatattttttaaaataactgggcctcatggtgcattcctgtaatctgagctagttgggaggatagctagagcccaggagatcgaggctgcagagaaccgtgatcacacgactgcactccagcctgggtgacagagcaagaccctgtctcaatagatagatagatagatagatagatagatagatagatagatagatagataaaaacagagaggtgaaaaatatggttttaagggttctgtttaagaatactctgttccaacatggagtttgtcaactctaaagtggtaaaaaacaagacagattgtagacattttcataaaaggcaggattatttggtgtcaccaaattaaatatgttaatggtcacagcggaggccgactcaatcagccttttattctgccaggctatttgatactgctgagggcttacctatttcctgaggagaaaaatagtcattaaaatgaccttataaatgatagggacttagggtgatagaagtgcaaagcatgactgtcaaatttttggagcaggttttctgacttcggtcggaaaaccccttgtagttcctgcaatttaattttcgtttaaaactttattttattctttaacttaaaaaaaatatata

SEQ ID NO: 488 - DNA, 1087 bp, synthetic construct
  source 1..1087: mol_type = other DNA
gggcatgaaagataaagttctggaggtaagtagtgatgatggttacacaacaatgtgaacatattctatgccagtgaatttacacttaaggttaaaatggtaaattttatgtatactttggcataatttaaaaaaaagtttgaaaaagaaaaaagacaaaacaataatcgtctttggagaagtctgttacactgaatctggagccaagtgaacagaaccctgattttgatcccttttctctcaaaagcccttcgcagtctctgaattaagtctattagcatgttcctcccatagtgctttgcttcatatcaacaaaaacctagctaagtgaaatcagcaacgatatgcagaaaccacctacgcaggtcacaaacatctttctatgattgtataattttcaagcaagcaataagtgaagatttttccataggccctaaactcacctttgcgaaataggaagctggtttattgggagtgatgagcagggggcgtaacaaattaatgatagggacttagggtgatagaagtgcaaagcatgactgtcaaatttttggagcaggttttctgacttcggtcggaaaacccctactttctggagtttcaaaaacagactgtacgccaagggtcatatctttttttgtattggtttgtgtcttggttggtgtcttaggtgttaatcctacagtggagggtttatgggaataggaagtaacatgtcgcctgcatgtcataggagaaaaagcgagcatcagccgtatcggctttgtaacacaaattagctatcgtgaagtccgctcagctcttccctttctaccctggctgctttttgcagggattggtccgtggtctccagtctcttgggttctcaccctgtgtgaaaatcttcgtgtttttccctaccccccagtcacctcttacacagcctctgcttccaagcgcagcccccacaggagtttgtaggatttctgtgctagcggggaatgtgttctcacctcatagagccaggtagaaattatgcagatgggcagttctctgggaagaaagcagggcctttggggctctcagtgtccccgttgggttgtagaca

SEQ ID NO: 489 - DNA, 1087 bp, synthetic construct
  source 1..1087: mol_type = other DNA
gggcatgaaagataaagttctggaggtaagtagtgatgatggttacacaacaatgtgaacatattctatgccagtgaatttacacttaaggttaaaatggtaaattttatgtatactttggcataatttaaaaaaaagtttgaaaaagaaaaaagacaaaacaataatcgtctttggagaagtctgttacactgaatctggagccaagtgaacagaaccctgattttgatcccttttctctcaaaagcccttcgcagtctctgaattaagtctattagcatgttcctcccatagtgctttgcttcatatcaacaaaaacctagctaagtgaaatcagcaacgatatgcagaaaccacctacgcaggtcacaaacatctttctatgattgtataattttcaagcaagcaataagtgaagatttttccataggccctaaactcacctttgcgaaataggaagctggtttattgggagtgatgagcagggggcgtaacaaattaatgatagggacttagggtgatagaagtgcaaagcatgactgtcaaatttttggagcaggttttctgacttcggtcggaaaacccctactttctggagtttctaaaagtagactgtacgctaagggtcatatctttttttgttttggtttgtgtcttggttggcgtcttaaatgttaatcctacagtggagggctggcgaataggaagtaacatgtcgcctgcacgccataggagaaaaagcgagcatcagccgtatcggctttgtaacacaaattagctatcgtgaagtccgctcagctcttccctttctaccctggctgctttttgcagggattggtccgtggtctccagtctcttgggttctcaccctgtgtgaaaatcttcctgtttttccctaccccccaagtcacctcttacacagcctctgcttccaagcgcagcccccacaggagtttgtaggatttctgtgctagcggggagtgtgttctcacctcatagagccaggtagaaactacgcagatgggtgctgttctccaggaagaaagcagggcctttggggctctcagtgtccccgttgggttgtaga

SEQ ID NO: 490 - DNA, 1087 bp, synthetic construct
  source 1..1087: mol_type = other DNA
gggcatgaaagataaagttctggaggtaagtagtgatgatggttacacaacaatgtgaacatattctatgccagtgaatttacacttaaggttaaaatggtaaattttatgtatactttggcataatttaaaaaaaagtttgaaaaagaaaaaagacaaaacaataatcgtctttggagaagtctgttacactgaatctggagccaagtgaacagaaccctgattttgatcccttttctctcaaaagcccttcgcagtctctgaattaagtctattagcatgttcctcccatagtgctttgcttcatatcaacaaaaacctagctaagtgaaatcagcaacgatatgcagaaaccacctacgcaggtcacaaacatctttctatgattgtataattttcaagcaagcaataagtgaagatttttccataggccctaaactcacctttgcgaaataggaagctggtttattgggagtgatgagcagggggcgtaacaaattaatgatagggacttagggtgatagaagtgcaaagcatgactgtcaaatttttggagcaggttttctgacttcggtcggaaaacccctactttctggagtttcaaaaacagaccgtacgccaagggtcatgtcttttttcgtattggtttgtgtcttagttgttaatcctacagtggaggcctggggaataagaagtaacatgtggcctgcacgccataggagaaaaagcgagcatcagccgtatcggctttgtaacacaaattagctatcgtgaagtccgctcagctcttccatttctaccctggctgctttttgcagggattggtccgtggtctccagtctcttgggttctcaccctgtgtgaaaatcttcgtgtttttccctaccccccaagtcacctcttacacagcctctgcttccaagcgcagcccccacaggagtttgtaggatttctgtgctagcggggagtgtgttctcacctcatagagccaggtagaaattatgcagatgggcgctgttctctgggaagaaagcagggcctttggggctctcagtgtccccgttgggttgtagacataacactctta

SEQ ID NO: 491 - DNA, 891 bp, synthetic construct
  source 1..891: mol_type = other DNA
gggcatgaaagataaagttctggaggtaagtagtgatgatggttacacaacaatgtgaacatattctatgccagtgaatttacacttaaggttaaaatggtaaattttatgtatactttggcataatttaaaaaaaagtttgaaaaagaaaaaagacaaaacaataatcgtctttggagaagtctgttacactgaatctggagccaagtgaacagaaccctgattttgatcccttttctctcaaaagcccttcgcagtctctgaattaagtctattagcatgttcctcccatagtgctttgcttcatatcaacaaaaacctagctaagtgaaatcagcaacgatatgcagaaaccacctacgcaggtcacaaacatctttctatgattgtataattttcaagcaagcaataagtgaagatttttccataggccctaaactcacctttgcgaaataggaagctggtttattgggagtgatgagcagggggcgtaacaaattaatgatagggacttagggtgatagaagtgcaaagcatgactgtcaaatttttggagcaggttttctgacttcggtcggaaaacccctcctccggggatacaacgtgtttcctaaaagtagagggaggtaagagacggtagcacctgcggggcggcttgcacgccgagtgcctgtgacgcgccggcttaacttaactgcttccctgaagtaccttgaggttcctgatgtgcgggcggtagacggtaggcttatgcggcacgctgtcgtttccaccgtggctactgcgctttgggaaggccacgacctcctcctttggggaggtccttaggatctcagcttggcagtcgagtgggtggcgaccttttaaaggaatgggacccacccggagttc

SEQ ID NO: 492 - DNA, 1079 bp, synthetic construct
  source 1..1079: mol_type = other DNA
gggcatgaaagataaagttctggaggtaagtagtgatgatggttacacaacaatgtgaacatattctatgccagtgaatttacacttaaggttaaaatggtaaattttatgtatactttggcataatttaaaaaaaagtttgaaaaagaaaaaagacaaaacaataatcgtctttggagaagtctgttacactgaatctggagccaagtgaacagaaccctgattttgatcccttttctctcaaaagcccttcgcagtctctgaattaagtctattagcatgttcctcccatagtgctttgcttcatatcaacaaaaacctagctaagtgaaatcagcaacgatatgcagaaaccacctacgcaggtcacaaacatctttctatgattgtataattttcaagcaagcaataagtgaagatttttccataggccctaaactcacctttgcgaaataggaagctggtttattgggagtgatgagcagggggcgtaacaaattaatgatagggacttagggtgatagaagtgcaaagcatgactgtcaaatttttggagcaggttttctgacttcggtcggaaaacccctttcccttcttgtaatacaaaataataacaaccacagaggacatcgcaagtaaaatgtgtataacaaccccatctaaagaaccctatcatctttctactatctgtctacctaaatatgtatagtataaataaccctatatagcactctaagcaacttaagttaggtaacttagaaaactcttttttttttttgagactgagtctcactctgtcgcacccaggctggagtgcagtggcgtgatctcggctcactgcaacctccaccttctgggttcaagtgattctcccatctcagtctcccaagtagctgggattacaggcacgccaccatgccctgctacatttttttttttttagtagagatgaggtttcaccacattggccaggctgttctcgaactcctgacctcaggtgatccgcccaccttggcctcatgaagtgctgggattacaggtgtgagccactgtacccagccagaaaactcttaaaaaac

SEQ ID NO: 493 - DNA, 969 bp, synthetic construct
  source 1..969: mol_type = other DNA
gggcatgaaagataaagttctggaggtaagtagtgatgatggttacacaacaatgtgaacatattctatgccagtgaatttacacttaaggttaaaatggtaaattttatgtatactttggcataatttaaaaaaaagtttgaaaaagaaaaaagacaaaacaataatcgtctttggagaagtctgttacactgaatctggagccaagtgaacagaaccctgattttgatcccttttctctcaaaagcccttcgcagtctctgaattaagtctattagcatgttcctcccatagtgctttgcttcatatcaacaaaaacctagctaagtgaaatcagcaacgatatgcagaaaccacctacgcaggtcacaaacatctttctatgattgtataattttcaagcaagcaataagtgaagatttttccataggccctaaactcacctttgcgaaataggaagctggtttattgggagtgatgagcagggggcgtaacaaattaatgatagggacttagggtgatagaagtgcaaagcatgactgtcaaatttttggagcaggttttctgacttcggtcggaaaacccctctgaattttcttgcagttgaacaacagaggctttttttgtgtgtgtgggggtgcttggttttgggaggttgaagagtacttgttcgcaaactctctaaatgagagatggggaagtgtcttaccagctgattcgcgagagcacctgcaagtttacctgttttagtgatttgcgtttatgaaagttggagttgctgattttgtgatctctacttttaaggtaaaagcagggcggtgttgacttttcttgccagttggctgtcctgttttctttctcgcactgttttctttttgagacgaagtctgtcgctcaggctggagtgcactggcgtgatctcggctcgctgcaaactttgccgaacccctgtttagcgatttccgtttg

SEQ ID NO: 494 - DNA, 1087 bp, synthetic construct
  source 1..1087: mol_type = other DNA
gggcatgaaagataaagttctggaggtaagtagtgatgatggttacacaacaatgtgaacatattctatgccagtgaatttacacttaaggttaaaatggtaaattttatgtatactttggcataatttaaaaaaaagtttgaaaaagaaaaaagacaaaacaataatcgtctttggagaagtctgttacactgaatctggagccaagtgaacagaaccctgattttgatcccttttctctcaaaagcccttcgcagtctctgaattaagtctattagcatgttcctcccatagtgctttgcttcatatcaacaaaaacctagctaagtgaaatcagcaacgatatgcagaaaccacctacgcaggtcacaaacatctttctatgattgtataattttcaagcaagcaataagtgaagatttttccataggccctaaactcacctttgcgaaataggaagctggtttattgggagtgatgagcagggggcgtaacaaattaatgatagggacttagggtgatagaagtgcaaagcatgactgtcaaatttttggagcaggttttctgacttcggtcggaaaacccctatatgtggtaatccaacaatagaaattatttttaagtttgtgtgttcctttttctgttcaatggtgcttttgatattgttgtaaagcagtgactagcagattctgtgtggtaaaagcactgaaccctgtttagttcttttctccctaccttattggtaattatttctgtgtatatatgttccaaagaaatgcggcttgtatattcatgcttttcaactttttgtgatagacagttgatacacaagtagtacctcctccgggatcttcttagtcaagactgtttggtagatgcatgttttttgttacttgtaatgtacagtattcagttcattttctttttgcagcactgtccggttgaaacacaacgcgaggatcgggcgtggtggctcacgcctgtaatcccagcactttgggaggccgaggcaggacaatcaagaccaatcctggtcatcaaggcaggagaatcaagaccatcgaggtcaggagatcaagaccatcct

SEQ ID NO: 495 - DNA, 1085 bp, synthetic construct
  source 1..1085: mol_type = other DNA
gggcatgaaagataaagttctggaggtaagtagtgatgatggttacacaacaatgtgaacatattctatgccagtgaatttacacttaaggttaaaatggtaaattttatgtatactttggcataatttaaaaaaaagtttgaaaaagaaaaaagacaaaacaataatcgtctttggagaagtctgttacactgaatctggagccaagtgaacagaaccctgattttgatcccttttctctcaaaagcccttcgcagtctctgaattaagtctattagcatgttcctcccatagtgctttgcttcatatcaacaaaaacctagctaagtgaaatcagcaacgatatgcagaaaccacctacgcaggtcacaaacatctttctatgattgtataattttcaagcaagcaataagtgaagatttttccataggccctaaactcacctttgcgaaataggaagctggtttattgggagtgatgagcagggggcgtaacaaattaatgatagggacttagggtgatagaagtgcaaagcatgactgtcaaatttttggagcaggttttctgacttcggtcggaaaacccctacatcaggttgtttttctgtttttacatcaggttgtttttctgtttggttttttttttacaccacgtttatacgccggtgcacggtttaccactgaaaacacctttcatctacaggtgatatcttttaacacaaataaaatgtagtagtcctaggagacggaatagaaggaggtggggcctaggcagattcatctctgcggtgcattttgcctctggccctcgggccctagtttgcgatctttcccatcttgcctctgcttccctctgcacaatcctgagtattgcagtaccttacacttaaggaaatttcgtcttgccaaagttgatccatttcagctccgaaacataacaggaactagtgcaacgataaacgtatgaggaacttgcaataagagtgacagaatcctttgaatcaaaaaaaaaaaaagccaccacttaatgagtatctaccatatgtcaagggcttcaccaatatttcattgaaatattccagacca

SEQ ID NO: 496 - DNA, 1087 bp, synthetic construct
  source 1..1087: mol_type = other DNA
gggcatgaaagataaagttctggaggtaagtagtgatgatggttacacaacaatgtgaacatattctatgccagtgaatttacacttaaggttaaaatggtaaattttatgtatactttggcataatttaaaaaaaagtttgaaaaagaaaaaagacaaaacaataatcgtctttggagaagtctgttacactgaatctggagccaagtgaacagaaccctgattttgatcccttttctctcaaaagcccttcgcagtctctgaattaagtctattagcatgttcctcccatagtgctttgcttcatatcaacaaaaacctagctaagtgaaatcagcaacgatatgcagaaaccacctacgcaggtcacaaacatctttctatgattgtataattttcaagcaagcaataagtgaagatttttccataggccctaaactcacctttgcgaaataggaagctggtttattgggagtgatgagcagggggcgtaacaaattaatgatagggacttagggtgatagaagtgcaaagcatgactgtcaaatttttggagcaggttttctgacttcggtcggaaaacccctcttatgatgtttgttgccaatgatagattgttttcactgtgcaaaaattatgggtagttttggtggtcttgatgcagttgtaagcttggggtatgaaggtttgggccacgcctgggcgcttccggctgcgccggatgctgtttcctttccgctcccaggggcgttgggaacggttgtaggacgtggctctttattcgtgagttttccatttacctccgctgaacctagagcttcagacgccctatggcgtccgcctcgacccaaccggcggccttgagcgctgagcaagcaaagggtgagaatcgtcctagtcaaggcataggctgctggcctggggtagtcaaggcatgggctgctggtctggggaggatgcgggcggaggatgtggggcgacaaacctggctacgtccgccgggaaaatggggtaggggacgccgggtaccgtccttctaagtggggcgcttgcccccaagacttgggatcttattgggttacctaca

SEQ ID NO: 497 - DNA, 1085 bp, synthetic construct
  source 1..1085: mol_type = other DNA
gggcatgaaagataaagttctggaggtaagtagtgatgatggttacacaacaatgtgaacatattctatgccagtgaatttacacttaaggttaaaatggtaaattttatgtatactttggcataatttaaaaaaaagtttgaaaaagaaaaaagacaaaacaataatcgtctttggagaagtctgttacactgaatctggagccaagtgaacagaaccctgattttgatcccttttctctcaaaagcccttcgcagtctctgaattaagtctattagcatgttcctcccatagtgctttgcttcatatcaacaaaaacctagctaagtgaaatcagcaacgatatgcagaaaccacctacgcaggtcacaaacatctttctatgattgtataattttcaagcaagcaataagtgaagatttttccataggccctaaactcacctttgcgaaataggaagctggtttattgggagtgatgagcagggggcgtaacaaattaatgatagggacttagggtgatagaagtgcaaagcatgactgtcaaatttttggagcaggttttctgacttcggtcggaaaaccccttctttactgttatatgttaggcgaaatattacgcgtttggagtaagtggtgctttttgtaactgaaaagagattctgtgtgtgtttttttttttttagaggctgcatagttatttgtatgaaccgcaggtgacctaattagcaaggtaattcagacctgtatcctagcacttaagaagtggaagtgggataaccctgcgtgttctcgtgtgggaggctagcttaagcaacaaagcaggaaggccccaccaacaaaagaatttaaaaattatacgtgcgtggtggcgcgcgtatgaggaaattatttggcaactgtgttacagtatagcagcaaatggaatagacctagtccctgactttaggagacctgcctcagccccccgaatggctgggactacaggcgtgcgcctccgcgcccagctaatttttgcatttttggtagagacgggttcaccatgttggccaggatggtctccatctcttcatctggtgatccgcc

SEQ ID NO: 498 - DNA, 1087 bp, synthetic construct
  source 1..1087: mol_type = other DNA
gggcatgaaagataaagttctggaggtaagtagtgatgatggttacacaacaatgtgaacatattctatgccagtgaatttacacttaaggttaaaatggtaaattttatgtatactttggcataatttaaaaaaaagtttgaaaaagaaaaaagacaaaacaataatcgtctttggagaagtctgttacactgaatctggagccaagtgaacagaaccctgattttgatcccttttctctcaaaagcccttcgcagtctctgaattaagtctattagcatgttcctcccatagtgctttgcttcatatcaacaaaaacctagctaagtgaaatcagcaacgatatgcagaaaccacctacgcaggtcacaaacatctttctatgattgtataattttcaagcaagcaataagtgaagatttttccataggccctaaactcacctttgcgaaataggaagctggtttattgggagtgatgagcagggggcgtaacaaattaatgatagggacttagggtgatagaagtgcaaagcatgactgtcaaatttttggagcaggttttctgacttcggtcggaaaacccctaccttattcacgcctaaaaagtagactgactgtggggtggtcgtgttttttgtttcttgttggtaggtggtgaatgcgtttttttcgttgttttctccgttactcaggctgccagttgcttggcagtcttgtcgctggctgtggacgctctgcacttcatcaccgtccccagctgcgctttgagccggtctaaggttgcccacagtattgacgttgggacccacgaaactggcaatttccatgtgtgcggccttacccagttctcccaaacttctgcgtataaccgcttctctgtgcttcagaaagataagtccggccccggcctcacacagcagctcagttcgtgacagcgtttaatatgtaaaatggagcaaataatttatagggcgttgggagagttaaagagactaattcatttacgtgttaaatacagggaatggcttttgcattgatataaccccagcctccagcatgcgccagacctgacgtaggtgttcggc

SEQ ID NO: 499 - DNA, 1087 bp, synthetic construct
  source 1..1087: mol_type = other DNA
gggcatgaaagataaagttctggaggtaagtagtgatgatggttacacaacaatgtgaacatattctatgccagtgaatttacacttaaggttaaaatggtaaattttatgtatactttggcataatttaaaaaaaagtttgaaaaagaaaaaagacaaaacaataatcgtctttggagaagtctgttacactgaatctggagccaagtgaacagaaccctgattttgatcccttttctctcaaaagcccttcgcagtctctgaattaagtctattagcatgttcctcccatagtgctttgcttcatatcaacaaaaacctagctaagtgaaatcagcaacgatatgcagaaaccacctacgcaggtcacaaacatctttctatgattgtataattttcaagcaagcaataagtgaagatttttccataggccctaaactcacctttgcgaaataggaagctggtttattgggagtgatgagcagggggcgtaacaaattaatgatagggacttagggtgatagaagtgcaaagcatgactgtcaaatttttggagcaggttttctgacttcggtcggaaaaccccttttgacccattacccatctaagttagatgcttttttaaatgttttttaatttttaaatttttaatttttttcattatttattttttatttttgagacggatctcggctcactgtaacctccacctcccgggttcaagcgattctcctgactcagcctcccgagtagctgggattacaggcgcgcgccaccatgcccggctaatttttctatttttagtaaagacggggtttcgccatgttgaccagggtggtcttgaactcctgacgtcaggtgatcctcctgcctcgtgctgggattgcaggcgtgagccaccgctcccggcccttagatgctttttaatcagcaagtacgcaatgctttcctgacaggaatgtcaagtccgtcaggaaatccacataagggtgttaagcaggcaaagtaccacatacagattaaaatcaaaagcactgtcaacgcttatttaatttatacagtagaccctaacttttctaattttgtg

SEQ ID NO: 500 - DNA, 1087 bp, synthetic construct
  source 1..1087: mol_type = other DNA
gggcatgaaagataaagttctggaggtaagtagtgatgatggttacacaacaatgtgaacatattctatgccagtgaatttacacttaaggttaaaatggtaaattttatgtatactttggcataatttaaaaaaaagtttgaaaaagaaaaaagacaaaacaataatcgtctttggagaagtctgttacactgaatctggagccaagtgaacagaaccctgattttgatcccttttctctcaaaagcccttcgcagtctctgaattaagtctattagcatgttcctcccatagtgctttgcttcatatcaacaaaaacctagctaagtgaaatcagcaacgatatgcagaaaccacctacgcaggtcacaaacatctttctatgattgtataattttcaagcaagcaataagtgaagatttttccataggccctaaactcacctttgcgaaataggaagctggtttattgggagtgatgagcagggggcgtaacaaattaatgatagggacttagggtgatagaagtgcaaagcatgactgtcaaatttttggagcaggttttctgacttcggtcggaaaacccctgtttacttggttttaaaaatagcttgcactagcgataccgcgaatatggttattaggtttgttaggcacagtcgtgtcttactatagaaaaataacgtagtgttcattttgctgcctgtatgtgttaatttgtccttattgcgccattgttcttgttaagtcttctgtaaggagttgcgggtttcaaactgtcagtctgagagcataagctcacttttcagtcagttgaattgaatgttacattcgattggttctggatattgatattacccaaggcttgtcctgtttgtaagtcttttcctacacctgacaatatgattatgtttacaatgtccctagaactctgggtgtatcgttcccactgaataaaatttgatctctaagttgacctataaatttaagtaccaaaaaactggtttgtaagattttggaaggcagaggcagggaagagaccaacgtggtctacatataaagtaccaggtacatataaagtaccaggt

SEQ ID NO: 501 - DNA, 1083 bp, synthetic construct
  source 1..1083: mol_type = other DNA
gggcatgaaagataaagttctggaggtaagtagtgatgatggttacacaacaatgtgaacatattctatgccagtgaatttacacttaaggttaaaatggtaaattttatgtatactttggcataatttaaaaaaaagtttgaaaaagaaaaaagacaaaacaataatcgtctttggagaagtctgttacactgaatctggagccaagtgaacagaaccctgattttgatcccttttctctcaaaagcccttcgcagtctctgaattaagtctattagcatgttcctcccatagtgctttgcttcatatcaacaaaaacctagctaagtgaaatcagcaacgatatgcagaaaccacctacgcaggtcacaaacatctttctatgattgtataattttcaagcaagcaataagtgaagatttttccataggccctaaactcacctttgcgaaataggaagctggtttattgggagtgatgagcagggggcgtaacaaattaatgatagggacttagggtgatagaagtgcaaagcatgactgtcaaatttttggagcaggttttctgacttcggtcggaaaacccctatttttgtggtgctaaaagttagattgcattccgcccttctcacgtctctttacgtgttgtttgcgaggcgtggcctcggaggtaaatggtctccttttacctcagataagcttacctttgctctgtgagtaagaatgtagctacacttccaaatttagctattgtcctttgcggtccaaatgaaaatattaccttccgatctaacaatgttaaactagtcccaggcccttctatcgattgccagaatagactagactactacacagacacaccctctcaaatcaggccagctcctgcaacctgcacctacagtttgtcccctgggacaaatgaaaggacaggccctctttcccccccccccccaaatcagagcacacacagatcttggggtctggggcagaaatttcgttcatggaaaaaacaaacaaacaaacaaacacgatcaaaggaagctcgttccctttggcctcagggtttcttagacgccgtgttccc

SEQ ID NO: 502 - DNA, 1084 bp, synthetic construct
  source 1..1084: mol_type = other DNA
gggcatgaaagataaagttctggaggtaagtagtgatgatggttacacaacaatgtgaacatattctatgccagtgaatttacacttaaggttaaaatggtaaattttatgtatactttggcataatttaaaaaaaagtttgaaaaagaaaaaagacaaaacaataatcgtctttggagaagtctgttacactgaatctggagccaagtgaacagaaccctgattttgatcccttttctctcaaaagcccttcgcagtctctgaattaagtctattagcatgttcctcccatagtgctttgcttcatatcaacaaaaacctagctaagtgaaatcagcaacgatatgcagaaaccacctacgcaggtcacaaacatctttctatgattgtataattttcaagcaagcaataagtgaagatttttccataggccctaaactcacctttgcgaaataggaagctggtttattgggagtgatgagcagggggcgtaacaaattaatgatagggacttagggtgatagaagtgcaaagcatgactgtcaaatttttggagcaggttttctgacttcggtcggaaaacccctataactggtaaccaaaagcagattactttcccccttgtggtcttcgcgtttgcggacgggagagaactttcggccattttccttttagaaatttaacttcttgaaggccaccaggtgacccttacttccctctcacctttccttctacctgtactttctctattaaaaagcctgcagaagtacccttgacaaattgccaaaaatgacacctaaaaaaaaaaaaaggaaaaacgacaccttaggtaattataggttgtaagaaaaagatttgacctcttggagtttttatttcttaataccaaaggacacccaaggaacgtatctctcaaaattgggtttcaaacctcagccgtttccttcttagttccagtgcttaacacgcaacagacctgcacaccactacactgcatacgagttttaaagttaataaatcagtcacccctccatagtcttctacctacttgaagacagaaacggctgctaggaagcaattcttc

SEQ ID NO: 503 - DNA, 1087 bp, synthetic construct
  source 1..1087: mol_type = other DNA
gggcatgaaagataaagttctggaggtaagtagtgatgatggttacacaacaatgtgaacatattctatgccagtgaatttacacttaaggttaaaatggtaaattttatgtatactttggcataatttaaaaaaaagtttgaaaaagaaaaaagacaaaacaataatcgtctttggagaagtctgttacactgaatctggagccaagtgaacagaaccctgattttgatcccttttctctcaaaagcccttcgcagtctctgaattaagtctattagcatgttcctcccatagtgctttgcttcatatcaacaaaaacctagctaagtgaaatcagcaacgatatgcagaaaccacctacgcaggtcacaaacatctttctatgattgtataattttcaagcaagcaataagtgaagatttttccataggccctaaactcacctttgcgaaataggaagctggtttattgggagtgatgagcagggggcgtaacaaattaatgatagggacttagggtgatagaagtgcaaagcatgactgtcaaatttttggagcaggttttctgacttcggtcggaaaacccctctggggaataagagtggtttaaagaaagaacaatttgagagatctgcttagatctaataaaacccaagtatagtttctttagacgtcttatatctcacgtaggacctcttatttcagactcactgcaagaacaagctaaagaactatatacagtcaggaacaaggtgagccatcgcggttctcagtcccatgatcttaagagtttttcctcttcccctcttccctggctgtcctggagctcactctgtagaccaggctggtctcaaactcagaaatccacttacctctgcctcccaagggctgggattaaaggcatgcaccaccattgcccggcagggtatgtggactatgctgtccttcaactcagagatcgtggtactttaaatctcattttccgaaagaaaagaaaagaaaggaaggggggaaataaagccagtatattttgcacccacaatctgaagttctacaaatattgttagaaaatgcaaaggacccaagtc

SEQ ID NO: 504 - DNA, 1087 bp, synthetic construct
  source 1..1087: mol_type = other DNA
gggcatgaaagataaagttctggaggtaagtagtgatgatggttacacaacaatgtgaacatattctatgccagtgaatttacacttaaggttaaaatggtaaattttatgtatactttggcataatttaaaaaaaagtttgaaaaagaaaaaagacaaaacaataatcgtctttggagaagtctgttacactgaatctggagccaagtgaacagaaccctgattttgatcccttttctctcaaaagcccttcgcagtctctgaattaagtctattagcatgttcctcccatagtgctttgcttcatatcaacaaaaacctagctaagtgaaatcagcaacgatatgcagaaaccacctacgcaggtcacaaacatctttctatgattgtataattttcaagcaagcaataagtgaagatttttccataggccctaaactcacctttgcgaaataggaagctggtttattgggagtgatgagcagggggcgtaacaaattaatgatagggacttagggtgatagaagtgcaaagcatgactgtcaaatttttggagcaggttttctgacttcggtcggaaaacccctctcggtttatcttaaagggttttaaatatagaaagcttccttagtcttatgggtgagagtgctgtttaagccttacctaggtatgtctttgaacatttattacagattgttatttgtgactatgaccactcaggtgttctgttcttgtgaatttagacacactcagaaaggctacacactcaaagaccacaccaaagtgaagtactatctgggccgtgaaactggtcacatatcagttattttgcagtaaaacaaggaagtcaatcatactgcttcagtgggtcagggagtcaagaatgcacagtacaagagctggtgagattcctcagcaggtaagagcactgaatgctcttccaaagattctgagttcaaatcccagcaaccacgtggtggatttgaacaaaggatgaaaacaaccatccataaccagatctgatgccctcttctggagtgtcaaaagacagctatggtgtacttacataaataaataagtaaaaaca

SEQ ID NO: 505 - DNA, 1087 bp, synthetic construct
  source 1..1087: mol_type = other DNA
gggcatgaaagataaagttctggaggtaagtagtgatgatggttacacaacaatgtgaacatattctatgccagtgaatttacacttaaggttaaaatggtaaattttatgtatactttggcataatttaaaaaaaagtttgaaaaagaaaaaagacaaaacaataatcgtctttggagaagtctgttacactgaatctggagccaagtgaacagaaccctgattttgatcccttttctctcaaaagcccttcgcagtctctgaattaagtctattagcatgttcctcccatagtgctttgcttcatatcaacaaaaacctagctaagtgaaatcagcaacgatatgcagaaaccacctacgcaggtcacaaacatctttctatgattgtataattttcaagcaagcaataagtgaagatttttccataggccctaaactcacctttgcgaaataggaagctggtttattgggagtgatgagcagggggcgtaacaaattaatgatagggacttagggtgatagaagtgcaaagcatgactgtcaaatttttggagcaggttttctgacttcggtcggaaaacccctccacattttgtgtttaaaaatagaaatatttaagtgagatcagtttaaatctgctttatctagggtgtctaactgcttgcatctttttaacttttccttatttgtgagaaggtctgtaaaacttattatatgttagtacactgtagctgtcttcagacactccagaagagggattcagatcaccttacagatggttttgagccaccatgtggttgctgggatttgaactcaggacctttagaaaagtagttgggtgctcttacccgctgagccatctcaccagccctttttttttcttttttccagttcgggtttctctgtgtgtagccctggctgtcctggaactcattctgtagaccgggctggcctcgaactcagaaatctgcctgcctctgcctcccaagtgctgggattaaaggaatgtgccttcattgcccggctctagggctttttgttgttgtttgtttgtttgtttgtttgtttgcttttgtggatggcct

SEQ ID NO: 506 - DNA, 1087 bp, synthetic construct
  source 1..1087: mol_type = other DNA
gggcatgaaagataaagttctggaggtaagtagtgatgatggttacacaacaatgtgaacatattctatgccagtgaatttacacttaaggttaaaatggtaaattttatgtatactttggcataatttaaaaaaaagtttgaaaaagaaaaaagacaaaacaataatcgtctttggagaagtctgttacactgaatctggagccaagtgaacagaaccctgattttgatcccttttctctcaaaagcccttcgcagtctctgaattaagtctattagcatgttcctcccatagtgctttgcttcatatcaacaaaaacctagctaagtgaaatcagcaacgatatgcagaaaccacctacgcaggtcacaaacatctttctatgattgtataattttcaagcaagcaataagtgaagatttttccataggccctaaactcacctttgcgaaataggaagctggtttattgggagtgatgagcagggggcgtaacaaattaatgatagggacttagggtgatagaagtgcaaagcatgactgtcaaatttttggagcaggttttctgacttcggtcggaaaacccctaaaaccagtaagggagaaaggtcaagtaacatataaaggaaggcctatcagaattacaccagacttttcaccagagactatgaaagccagaagagcctggacagatgttatacagacactaagagaacacaaatgccagcccaggctactatacctggccaaactctcaattaccatagatggagaaaccaaagtattccacgacaaaaacaaattcacacaatatctttccacgaatccagcccttcaaaggataatgacagaaaagaagcaatacaaggacggaaatcacgccctagaacaaccaagaaactaatcattcaacaaaccaaaaagaagacagccacaagaacagaatgccaactctaacaacaaaaataaaaggaagcaacaattacttttccttaatatctcttaatatcaatggactcaattccccaataaaaagacatagactaacagactggctacacaaacaggacccaacattctgctgctta

SEQ ID NO: 507 - DNA, 1087 bp, synthetic construct
  source 1..1087: mol_type = other DNA
gggcatgaaagataaagttctggaggtaagtagtgatgatggttacacaacaatgtgaacatattctatgccagtgaatttacacttaaggttaaaatggtaaattttatgtatactttggcataatttaaaaaaaagtttgaaaaagaaaaaagacaaaacaataatcgtctttggagaagtctgttacactgaatctggagccaagtgaacagaaccctgattttgatcccttttctctcaaaagcccttcgcagtctctgaattaagtctattagcatgttcctcccatagtgctttgcttcatatcaacaaaaacctagctaagtgaaatcagcaacgatatgcagaaaccacctacgcaggtcacaaacatctttctatgattgtataattttcaagcaagcaataagtgaagatttttccataggccctaaactcacctttgcgaaataggaagctggtttattgggagtgatgagcagggggcgtaacaaattaatgatagggacttagggtgatagaagtgcaaagcatgactgtcaaatttttggagcaggttttctgacttcggtcggaaaacccctcccaatttcactggtctacaatgaaagcaaaacagttctcttccccgctccccggtgtgtgagaggggctttgatccttctctggtttcctaggaaacgcgtatgtgctagagccacgctctgagacttccgcctcgtgcggtcccgcttcctttctgcctcctctggcctgcatccgtgggggaggtggctggctgcagggttctccggatctcttctgtgttcccactactcaagcaccgagtggcgttctatggcgtccgcctcggctcagcccgcggccctgagcgcggagcaggccaagggtgaggaaagagcctagtctgggtgtgggccgtcttctggggggagggcgcgatactattctttgcctctccaagtggggcccttgcccattagggcgaagggttgggaggacaagcttatcgggttgcttgcaggcctcggcccactaattccctgcctcttccctcctctgggctcgcccgccgtcctccgcg

SEQ ID NO: 508 - DNA, 1087 bp, synthetic construct
  source 1..1087: mol_type = other DNA
gggcatgaaagataaagttctggaggtaagtagtgatgatggttacacaacaatgtgaacatattctatgccagtgaatttacacttaaggttaaaatggtaaattttatgtatactttggcataatttaaaaaaaagtttgaaaaagaaaaaagacaaaacaataatcgtctttggagaagtctgttacactgaatctggagccaagtgaacagaaccctgattttgatcccttttctctcaaaagcccttcgcagtctctgaattaagtctattagcatgttcctcccatagtgctttgcttcatatcaacaaaaacctagctaagtgaaatcagcaacgatatgcagaaaccacctacgcaggtcacaaacatctttctatgattgtataattttcaagcaagcaataagtgaagatttttccataggccctaaactcacctttgcgaaataggaagctggtttattgggagtgatgagcagggggcgtaacaaattaatgatagggacttagggtgatagaagtgcaaagcatgactgtcaaatttttggagcaggttttctgacttcggtcggaaaacccctgaatttgttaaattacaggaggaagcttttttagttcattttacaaatactttcttgttaggtagataataccttctaaggttattatctggatcttctaagtctttttatcgctagcaagtctaagtttctggactttggaattagaagttaatgtcgtaggcgggcatggtggtccacgcctttaatcccagagtttgggaggcagacgcaggtggttttctgagttcgaggccatcctgctcttcaatgttagttccaggacagccagggttatacaaagaaaccctgtctcgagaaacaaaacaaacaaaaaaagagtagctgagtgctctgagttgtctctccagccccttagctatttattttcatttaaattatttttgttttattcgcttgtgtgcctgagtttgaatttcccgggattaacagttgaagactagggctggtgagatggctcagcggttaagattgccgactgctcttccaaaggtcctgag

SEQ ID NO: 509 - DNA, 1087 bp, synthetic construct
  source 1..1087: mol_type = other DNA
gggcatgaaagataaagttctggaggtaagtagtgatgatggttacacaacaatgtgaacatattctatgccagtgaatttacacttaaggttaaaatggtaaattttatgtatactttggcataatttaaaaaaaagtttgaaaaagaaaaaagacaaaacaataatcgtctttggagaagtctgttacactgaatctggagccaagtgaacagaaccctgattttgatcccttttctctcaaaagcccttcgcagtctctgaattaagtctattagcatgttcctcccatagtgctttgcttcatatcaacaaaaacctagctaagtgaaatcagcaacgatatgcagaaaccacctacgcaggtcacaaacatctttctatgattgtataattttcaagcaagcaataagtgaagatttttccataggccctaaactcacctttgcgaaataggaagctggtttattgggagtgatgagcagggggcgtaacaaattaatgatagggacttagggtgatagaagtgcaaagcatgactgtcaaatttttggagcaggttttctgacttcggtcggaaaacccctaccccctaattctacaagaatagaaagcttagcagctcctctgaatggttgctctcaggtgctagtggttgcaagtcgtatgttgatgcctgcctttgccctacctggtgtgtgagcgtgagcgcgccccacctctccagcctctctcttactgtttttcagacaagatgggactgttgttctcctactgctatgtacctcaatttcaattgatcatgcctggacataactgcccatgttgtaaggtcgtctacgttgtaaggtcgtgctcagtttctgatgcctagactagtcacctttccgtttgcctcctgactgtgtaaatgaggcaaatgaaggtggtctcttaactgacatgttagtgtttgacctatgggatagtttctcattgttgagacagaatttctagaagctggtccgctgagcggctaagagcacttgctgatattgcaaaggatctacctgggtttggttctcagcactcacatggaagttcacat

SEQ ID NO: 510 - DNA, 654 bp, synthetic construct
  source 1..654: mol_type = other DNA
gggcatgaaagataaagttctggaggtaagtagtgatgatggttacacaacaatgtgaacatattctatgccagtgaatttacacttaaggttaaaatggtaaattttatgtatactttggcataatttaaaaaaaagtttgaaaaagaaaaaagacaaaacaataatcgtctttggagaagtctgttacactgaatctggagccaagtgaacagaaccctgattttgatcccttttctctcaaaagcccttcgcagtctctgaattaagtctattagcatgttcctcccatagtgctttgcttcatatcaacaaaaacctagctaagtgaaatcagcaacgatatgcagaaaccacctacgcaggtcacaaacatctttctatgattgtataattttcaagcaagcaataagtgaagatttttccataggccctaaactcacctttgcgaaataggaagctggtttattgggagtgatgagcagggggcgtaacaaattaatgatagggacttagggtgatagaagtgcaaagcatgactgtcaaatttttggagcaggttttctgacttcggtcggaaaaccccttgtagttcctgcaatttaattttcgtttaaaactttattttattctttaacttaaaaaaaatatata

SEQ ID NO: 511 - DNA, 1081 bp, synthetic construct
  source 1..1081: mol_type = other DNA
gagacagggcttaaaagtcctgggcaattagctgggcacagtgtcgtgcgcctgtaatcccacctagttgggaggctgaggcagaagaatctcttgaacccgaggtagaggttgcagtgagccgagatcgcgccactgcactccagcctggatgacagagtgagaccctgtctcaaaaaaaaaaaaagtcctgggcagcaaggcctccacttcaccccctaaaggttgccccaagagcaccgtgtgactgctaaggtatttccggagtctaaagacgattattcaggtctcatttgcatacccataatacactgcaaacagtatttttttcggaaaaacatttatatattgcttgacatttttaagtatgagaattttgcatgcagaatttttttgtataaactttctcaggtagtaacccttgggattagtagacaccatcagtgtactaggaattgcagttacccgaaaattgagttacagaagtaactggtaatgatagggacttagggtgatagaagtgcaaagcatgactgtcaaatttttggagcaggttttctgacttcggtcggaaaacccctactttctggagtttcaaaaacagactgtacgccaagggtcatatctttttttgtattggtttgtgtcttggttggtgtcttaggtgttaatcctacagtggagggtttatgggaataggaagtaacatgtcgcctgcatgtcataggagaaaaagcgagcatcagccgtatcggctttgtaacacaaattagctatcgtgaagtccgctcagctcttccctttctaccctggctgctttttgcagggattggtccgtggtctccagtctcttgggttctcaccctgtgtgaaaatcttcgtgtttttccctaccccccagtcacctcttacacagcctctgcttccaagcgcagcccccacaggagtttgtaggatttctgtgctagcggggaatgtgttctcacctcatagagccaggtagaaattatgcagatgggcagttctctgggaagaaagcagggcctttggggctctcagtgtccccgttgggttgtagaca

SEQ ID NO: 512 - DNA, 1081 bp, synthetic construct
  source 1..1081: mol_type = other DNA
gagacagggcttaaaagtcctgggcaattagctgggcacagtgtcgtgcgcctgtaatcccacctagttgggaggctgaggcagaagaatctcttgaacccgaggtagaggttgcagtgagccgagatcgcgccactgcactccagcctggatgacagagtgagaccctgtctcaaaaaaaaaaaaagtcctgggcagcaaggcctccacttcaccccctaaaggttgccccaagagcaccgtgtgactgctaaggtatttccggagtctaaagacgattattcaggtctcatttgcatacccataatacactgcaaacagtatttttttcggaaaaacatttatatattgcttgacatttttaagtatgagaattttgcatgcagaatttttttgtataaactttctcaggtagtaacccttgggattagtagacaccatcagtgtactaggaattgcagttacccgaaaattgagttacagaagtaactggtaatgatagggacttagggtgatagaagtgcaaagcatgactgtcaaatttttggagcaggttttctgacttcggtcggaaaacccctactttctggagtttctaaaagtagactgtacgctaagggtcatatctttttttgttttggtttgtgtcttggttggcgtcttaaatgttaatcctacagtggagggctggcgaataggaagtaacatgtcgcctgcacgccataggagaaaaagcgagcatcagccgtatcggctttgtaacacaaattagctatcgtgaagtccgctcagctcttccctttctaccctggctgctttttgcagggattggtccgtggtctccagtctcttgggttctcaccctgtgtgaaaatcttcctgtttttccctaccccccaagtcacctcttacacagcctctgcttccaagcgcagcccccacaggagtttgtaggatttctgtgctagcggggagtgtgttctcacctcatagagccaggtagaaactacgcagatgggtgctgttctccaggaagaaagcagggcctttggggctctcagtgtccccgttgggttgtaga

SEQ ID NO: 513 - DNA, 1081 bp, synthetic construct
  source 1..1081: mol_type = other DNA
gagacagggcttaaaagtcctgggcaattagctgggcacagtgtcgtgcgcctgtaatcccacctagttgggaggctgaggcagaagaatctcttgaacccgaggtagaggttgcagtgagccgagatcgcgccactgcactccagcctggatgacagagtgagaccctgtctcaaaaaaaaaaaaagtcctgggcagcaaggcctccacttcaccccctaaaggttgccccaagagcaccgtgtgactgctaaggtatttccggagtctaaagacgattattcaggtctcatttgcatacccataatacactgcaaacagtatttttttcggaaaaacatttatatattgcttgacatttttaagtatgagaattttgcatgcagaatttttttgtataaactttctcaggtagtaacccttgggattagtagacaccatcagtgtactaggaattgcagttacccgaaaattgagttacagaagtaactggtaatgatagggacttagggtgatagaagtgcaaagcatgactgtcaaatttttggagcaggttttctgacttcggtcggaaaacccctactttctggagtttcaaaaacagaccgtacgccaagggtcatgtcttttttcgtattggtttgtgtcttagttgttaatcctacagtggaggcctggggaataagaagtaacatgtggcctgcacgccataggagaaaaagcgagcatcagccgtatcggctttgtaacacaaattagctatcgtgaagtccgctcagctcttccatttctaccctggctgctttttgcagggattggtccgtggtctccagtctcttgggttctcaccctgtgtgaaaatcttcgtgtttttccctaccccccaagtcacctcttacacagcctctgcttccaagcgcagcccccacaggagtttgtaggatttctgtgctagcggggagtgtgttctcacctcatagagccaggtagaaattatgcagatgggcgctgttctctgggaagaaagcagggcctttggggctctcagtgtccccgttgggttgtagacataacactctta

SEQ ID NO: 514 - DNA, 885 bp, synthetic construct
  source 1..885: mol_type = other DNA
gagacagggcttaaaagtcctgggcaattagctgggcacagtgtcgtgcgcctgtaatcccacctagttgggaggctgaggcagaagaatctcttgaacccgaggtagaggttgcagtgagccgagatcgcgccactgcactccagcctggatgacagagtgagaccctgtctcaaaaaaaaaaaaagtcctgggcagcaaggcctccacttcaccccctaaaggttgccccaagagcaccgtgtgactgctaaggtatttccggagtctaaagacgattattcaggtctcatttgcatacccataatacactgcaaacagtatttttttcggaaaaacatttatatattgcttgacatttttaagtatgagaattttgcatgcagaatttttttgtataaactttctcaggtagtaacccttgggattagtagacaccatcagtgtactaggaattgcagttacccgaaaattgagttacagaagtaactggtaatgatagggacttagggtgatagaagtgcaaagcatgactgtcaaatttttggagcaggttttctgacttcggtcggaaaacccctcctccggggatacaacgtgtttcctaaaagtagagggaggtaagagacggtagcacctgcggggcggcttgcacgccgagtgcctgtgacgcgccggcttaacttaactgcttccctgaagtaccttgaggttcctgatgtgcgggcggtagacggtaggcttatgcggcacgctgtcgtttccaccgtggctactgcgctttgggaaggccacgacctcctcctttggggaggtccttaggatctcagcttggcagtcgagtgggtggcgaccttttaaaggaatgggacccacccggagttc

SEQ ID NO: 515 - DNA, 1073 bp, synthetic construct
  source 1..1073: mol_type = other DNA
gagacagggcttaaaagtcctgggcaattagctgggcacagtgtcgtgcgcctgtaatcccacctagttgggaggctgaggcagaagaatctcttgaacccgaggtagaggttgcagtgagccgagatcgcgccactgcactccagcctggatgacagagtgagaccctgtctcaaaaaaaaaaaaagtcctgggcagcaaggcctccacttcaccccctaaaggttgccccaagagcaccgtgtgactgctaaggtatttccggagtctaaagacgattattcaggtctcatttgcatacccataatacactgcaaacagtatttttttcggaaaaacatttatatattgcttgacatttttaagtatgagaattttgcatgcagaatttttttgtataaactttctcaggtagtaacccttgggattagtagacaccatcagtgtactaggaattgcagttacccgaaaattgagttacagaagtaactggtaatgatagggacttagggtgatagaagtgcaaagcatgactgtcaaatttttggagcaggttttctgacttcggtcggaaaacccctttcccttcttgtaatacaaaataataacaaccacagaggacatcgcaagtaaaatgtgtataacaaccccatctaaagaaccctatcatctttctactatctgtctacctaaatatgtatagtataaataaccctatatagcactctaagcaacttaagttaggtaacttagaaaactcttttttttttttgagactgagtctcactctgtcgcacccaggctggagtgcagtggcgtgatctcggctcactgcaacctccaccttctgggttcaagtgattctcccatctcagtctcccaagtagctgggattacaggcacgccaccatgccctgctacatttttttttttttagtagagatgaggtttcaccacattggccaggctgttctcgaactcctgacctcaggtgatccgcccaccttggcctcatgaagtgctgggattacaggtgtgagccactgtacccagccagaaaactcttaaaaaac

SEQ ID NO: 516 - DNA, 963 bp, synthetic construct
  source 1..963: mol_type = other DNA
gagacagggcttaaaagtcctgggcaattagctgggcacagtgtcgtgcgcctgtaatcccacctagttgggaggctgaggcagaagaatctcttgaacccgaggtagaggttgcagtgagccgagatcgcgccactgcactccagcctggatgacagagtgagaccctgtctcaaaaaaaaaaaaagtcctgggcagcaaggcctccacttcaccccctaaaggttgccccaagagcaccgtgtgactgctaaggtatttccggagtctaaagacgattattcaggtctcatttgcatacccataatacactgcaaacagtatttttttcggaaaaacatttatatattgcttgacatttttaagtatgagaattttgcatgcagaatttttttgtataaactttctcaggtagtaacccttgggattagtagacaccatcagtgtactaggaattgcagttacccgaaaattgagttacagaagtaactggtaatgatagggacttagggtgatagaagtgcaaagcatgactgtcaaatttttggagcaggttttctgacttcggtcggaaaacccctctgaattttcttgcagttgaacaacagaggctttttttgtgtgtgtgggggtgcttggttttgggaggttgaagagtacttgttcgcaaactctctaaatgagagatggggaagtgtcttaccagctgattcgcgagagcacctgcaagtttacctgttttagtgatttgcgtttatgaaagttggagttgctgattttgtgatctctacttttaaggtaaaagcagggcggtgttgacttttcttgccagttggctgtcctgttttctttctcgcactgttttctttttgagacgaagtctgtcgctcaggctggagtgcactggcgtgatctcggctcgctgcaaactttgccgaacccctgtttagcgatttccgtttg

SEQ ID NO: 517 - DNA, 1081 bp, synthetic construct
  source 1..1081: mol_type = other DNA
gagacagggcttaaaagtcctgggcaattagctgggcacagtgtcgtgcgcctgtaatcccacctagttgggaggctgaggcagaagaatctcttgaacccgaggtagaggttgcagtgagccgagatcgcgccactgcactccagcctggatgacagagtgagaccctgtctcaaaaaaaaaaaaagtcctgggcagcaaggcctccacttcaccccctaaaggttgccccaagagcaccgtgtgactgctaaggtatttccggagtctaaagacgattattcaggtctcatttgcatacccataatacactgcaaacagtatttttttcggaaaaacatttatatattgcttgacatttttaagtatgagaattttgcatgcagaatttttttgtataaactttctcaggtagtaacccttgggattagtagacaccatcagtgtactaggaattgcagttacccgaaaattgagttacagaagtaactggtaatgatagggacttagggtgatagaagtgcaaagcatgactgtcaaatttttggagcaggttttctgacttcggtcggaaaacccctatatgtggtaatccaacaatagaaattatttttaagtttgtgtgttcctttttctgttcaatggtgcttttgatattgttgtaaagcagtgactagcagattctgtgtggtaaaagcactgaaccctgtttagttcttttctccctaccttattggtaattatttctgtgtatatatgttccaaagaaatgcggcttgtatattcatgcttttcaactttttgtgatagacagttgatacacaagtagtacctcctccgggatcttcttagtcaagactgtttggtagatgcatgttttttgttacttgtaatgtacagtattcagttcattttctttttgcagcactgtccggttgaaacacaacgcgaggatcgggcgtggtggctcacgcctgtaatcccagcactttgggaggccgaggcaggacaatcaagaccaatcctggtcatcaaggcaggagaatcaagaccatcgaggtcaggagatcaagaccatcct

SEQ ID NO: 518 - DNA, 1079 bp, synthetic construct
  source 1..1079: mol_type = other DNA
gagacagggcttaaaagtcctgggcaattagctgggcacagtgtcgtgcgcctgtaatcccacctagttgggaggctgaggcagaagaatctcttgaacccgaggtagaggttgcagtgagccgagatcgcgccactgcactccagcctggatgacagagtgagaccctgtctcaaaaaaaaaaaaagtcctgggcagcaaggcctccacttcaccccctaaaggttgccccaagagcaccgtgtgactgctaaggtatttccggagtctaaagacgattattcaggtctcatttgcatacccataatacactgcaaacagtatttttttcggaaaaacatttatatattgcttgacatttttaagtatgagaattttgcatgcagaatttttttgtataaactttctcaggtagtaacccttgggattagtagacaccatcagtgtactaggaattgcagttacccgaaaattgagttacagaagtaactggtaatgatagggacttagggtgatagaagtgcaaagcatgactgtcaaatttttggagcaggttttctgacttcggtcggaaaacccctacatcaggttgtttttctgtttttacatcaggttgtttttctgtttggttttttttttacaccacgtttatacgccggtgcacggtttaccactgaaaacacctttcatctacaggtgatatcttttaacacaaataaaatgtagtagtcctaggagacggaatagaaggaggtggggcctaggcagattcatctctgcggtgcattttgcctctggccctcgggccctagtttgcgatctttcccatcttgcctctgcttccctctgcacaatcctgagtattgcagtaccttacacttaaggaaatttcgtcttgccaaagttgatccatttcagctccgaaacataacaggaactagtgcaacgataaacgtatgaggaacttgcaataagagtgacagaatcctttgaatcaaaaaaaaaaaaagccaccacttaatgagtatctaccatatgtcaagggcttcaccaatatttcattgaaatattccagacca

SEQ ID NO: 519 - DNA, 1081 bp, synthetic construct
  source 1..1081: mol_type = other DNA
gagacagggcttaaaagtcctgggcaattagctgggcacagtgtcgtgcgcctgtaatcccacctagttgggaggctgaggcagaagaatctcttgaacccgaggtagaggttgcagtgagccgagatcgcgccactgcactccagcctggatgacagagtgagaccctgtctcaaaaaaaaaaaaagtcctgggcagcaaggcctccacttcaccccctaaaggttgccccaagagcaccgtgtgactgctaaggtatttccggagtctaaagacgattattcaggtctcatttgcatacccataatacactgcaaacagtatttttttcggaaaaacatttatatattgcttgacatttttaagtatgagaattttgcatgcagaatttttttgtataaactttctcaggtagtaacccttgggattagtagacaccatcagtgtactaggaattgcagttacccgaaaattgagttacagaagtaactggtaatgatagggacttagggtgatagaagtgcaaagcatgactgtcaaatttttggagcaggttttctgacttcggtcggaaaacccctcttatgatgtttgttgccaatgatagattgttttcactgtgcaaaaattatgggtagttttggtggtcttgatgcagttgtaagcttggggtatgaaggtttgggccacgcctgggcgcttccggctgcgccggatgctgtttcctttccgctcccaggggcgttgggaacggttgtaggacgtggctctttattcgtgagttttccatttacctccgctgaacctagagcttcagacgccctatggcgtccgcctcgacccaaccggcggccttgagcgctgagcaagcaaagggtgagaatcgtcctagtcaaggcataggctgctggcctggggtagtcaaggcatgggctgctggtctggggaggatgcgggcggaggatgtggggcgacaaacctggctacgtccgccgggaaaatggggtaggggacgccgggtaccgtccttctaagtggggcgcttgcccccaagacttgggatcttattgggttacctaca

SEQ ID NO: 520 - DNA, 1079 bp, synthetic construct
  source 1..1079: mol_type = other DNA
gagacagggcttaaaagtcctgggcaattagctgggcacagtgtcgtgcgcctgtaatcccacctagttgggaggctgaggcagaagaatctcttgaacccgaggtagaggttgcagtgagccgagatcgcgccactgcactccagcctggatgacagagtgagaccctgtctcaaaaaaaaaaaaagtcctgggcagcaaggcctccacttcaccccctaaaggttgccccaagagcaccgtgtgactgctaaggtatttccggagtctaaagacgattattcaggtctcatttgcatacccataatacactgcaaacagtatttttttcggaaaaacatttatatattgcttgacatttttaagtatgagaattttgcatgcagaatttttttgtataaactttctcaggtagtaacccttgggattagtagacaccatcagtgtactaggaattgcagttacccgaaaattgagttacagaagtaactggtaatgatagggacttagggtgatagaagtgcaaagcatgactgtcaaatttttggagcaggttttctgacttcggtcggaaaaccccttctttactgttatatgttaggcgaaatattacgcgtttggagtaagtggtgctttttgtaactgaaaagagattctgtgtgtgtttttttttttttagaggctgcatagttatttgtatgaaccgcaggtgacctaattagcaaggtaattcagacctgtatcctagcacttaagaagtggaagtgggataaccctgcgtgttctcgtgtgggaggctagcttaagcaacaaagcaggaaggccccaccaacaaaagaatttaaaaattatacgtgcgtggtggcgcgcgtatgaggaaattatttggcaactgtgttacagtatagcagcaaatggaatagacctagtccctgactttaggagacctgcctcagccccccgaatggctgggactacaggcgtgcgcctccgcgcccagctaatttttgcatttttggtagagacgggttcaccatgttggccaggatggtctccatctcttcatctggtgatccgcc

SEQ ID NO: 521 - DNA, 1081 bp, synthetic construct
  source 1..1081: mol_type = other DNA
gagacagggcttaaaagtcctgggcaattagctgggcacagtgtcgtgcgcctgtaatcccacctagttgggaggctgaggcagaagaatctcttgaacccgaggtagaggttgcagtgagccgagatcgcgccactgcactccagcctggatgacagagtgagaccctgtctcaaaaaaaaaaaaagtcctgggcagcaaggcctccacttcaccccctaaaggttgccccaagagcaccgtgtgactgctaaggtatttccggagtctaaagacgattattcaggtctcatttgcatacccataatacactgcaaacagtatttttttcggaaaaacatttatatattgcttgacatttttaagtatgagaattttgcatgcagaatttttttgtataaactttctcaggtagtaacccttgggattagtagacaccatcagtgtactaggaattgcagttacccgaaaattgagttacagaagtaactggtaatgatagggacttagggtgatagaagtgcaaagcatgactgtcaaatttttggagcaggttttctgacttcggtcggaaaacccctaccttattcacgcctaaaaagtagactgactgtggggtggtcgtgttttttgtttcttgttggtaggtggtgaatgcgtttttttcgttgttttctccgttactcaggctgccagttgcttggcagtcttgtcgctggctgtggacgctctgcacttcatcaccgtccccagctgcgctttgagccggtctaaggttgcccacagtattgacgttgggacccacgaaactggcaatttccatgtgtgcggccttacccagttctcccaaacttctgcgtataaccgcttctctgtgcttcagaaagataagtccggccccggcctcacacagcagctcagttcgtgacagcgtttaatatgtaaaatggagcaaataatttatagggcgttgggagagttaaagagactaattcatttacgtgttaaatacagggaatggcttttgcattgatataaccccagcctccagcatgcgccagacctgacgtaggtgttcggc

SEQ ID NO: 522 - DNA, 1081 bp, synthetic construct
  source 1..1081: mol_type = other DNA
gagacagggcttaaaagtcctgggcaattagctgggcacagtgtcgtgcgcctgtaatcccacctagttgggaggctgaggcagaagaatctcttgaacccgaggtagaggttgcagtgagccgagatcgcgccactgcactccagcctggatgacagagtgagaccctgtctcaaaaaaaaaaaaagtcctgggcagcaaggcctccacttcaccccctaaaggttgccccaagagcaccgtgtgactgctaaggtatttccggagtctaaagacgattattcaggtctcatttgcatacccataatacactgcaaacagtatttttttcggaaaaacatttatatattgcttgacatttttaagtatgagaattttgcatgcagaatttttttgtataaactttctcaggtagtaacccttgggattagtagacaccatcagtgtactaggaattgcagttacccgaaaattgagttacagaagtaactggtaatgatagggacttagggtgatagaagtgcaaagcatgactgtcaaatttttggagcaggttttctgacttcggtcggaaaaccccttttgacccattacccatctaagttagatgcttttttaaatgttttttaatttttaaatttttaatttttttcattatttattttttatttttgagacggatctcggctcactgtaacctccacctcccgggttcaagcgattctcctgactcagcctcccgagtagctgggattacaggcgcgcgccaccatgcccggctaatttttctatttttagtaaagacggggtttcgccatgttgaccagggtggtcttgaactcctgacgtcaggtgatcctcctgcctcgtgctgggattgcaggcgtgagccaccgctcccggcccttagatgctttttaatcagcaagtacgcaatgctttcctgacaggaatgtcaagtccgtcaggaaatccacataagggtgttaagcaggcaaagtaccacatacagattaaaatcaaaagcactgtcaacgcttatttaatttatacagtagaccctaacttttctaattttgtg

SEQ ID NO: 523 - DNA, 1081 bp, synthetic construct
  source 1..1081: mol_type = other DNA
gagacagggcttaaaagtcctgggcaattagctgggcacagtgtcgtgcgcctgtaatcccacctagttgggaggctgaggcagaagaatctcttgaacccgaggtagaggttgcagtgagccgagatcgcgccactgcactccagcctggatgacagagtgagaccctgtctcaaaaaaaaaaaaagtcctgggcagcaaggcctccacttcaccccctaaaggttgccccaagagcaccgtgtgactgctaaggtatttccggagtctaaagacgattattcaggtctcatttgcatacccataatacactgcaaacagtatttttttcggaaaaacatttatatattgcttgacatttttaagtatgagaattttgcatgcagaatttttttgtataaactttctcaggtagtaacccttgggattagtagacaccatcagtgtactaggaattgcagttacccgaaaattgagttacagaagtaactggtaatgatagggacttagggtgatagaagtgcaaagcatgactgtcaaatttttggagcaggttttctgacttcggtcggaaaacccctgtttacttggttttaaaaatagcttgcactagcgataccgcgaatatggttattaggtttgttaggcacagtcgtgtcttactatagaaaaataacgtagtgttcattttgctgcctgtatgtgttaatttgtccttattgcgccattgttcttgttaagtcttctgtaaggagttgcgggtttcaaactgtcagtctgagagcataagctcacttttcagtcagttgaattgaatgttacattcgattggttctggatattgatattacccaaggcttgtcctgtttgtaagtcttttcctacacctgacaatatgattatgtttacaatgtccctagaactctgggtgtatcgttcccactgaataaaatttgatctctaagttgacctataaatttaagtaccaaaaaactggtttgtaagattttggaaggcagaggcagggaagagaccaacgtggtctacatataaagtaccaggtacatataaagtaccaggt

SEQ ID NO: 524 - DNA, 1077 bp, synthetic construct
  source 1..1077: mol_type = other DNA
gagacagggcttaaaagtcctgggcaattagctgggcacagtgtcgtgcgcctgtaatcccacctagttgggaggctgaggcagaagaatctcttgaacccgaggtagaggttgcagtgagccgagatcgcgccactgcactccagcctggatgacagagtgagaccctgtctcaaaaaaaaaaaaagtcctgggcagcaaggcctccacttcaccccctaaaggttgccccaagagcaccgtgtgactgctaaggtatttccggagtctaaagacgattattcaggtctcatttgcatacccataatacactgcaaacagtatttttttcggaaaaacatttatatattgcttgacatttttaagtatgagaattttgcatgcagaatttttttgtataaactttctcaggtagtaacccttgggattagtagacaccatcagtgtactaggaattgcagttacccgaaaattgagttacagaagtaactggtaatgatagggacttagggtgatagaagtgcaaagcatgactgtcaaatttttggagcaggttttctgacttcggtcggaaaacccctatttttgtggtgctaaaagttagattgcattccgcccttctcacgtctctttacgtgttgtttgcgaggcgtggcctcggaggtaaatggtctccttttacctcagataagcttacctttgctctgtgagtaagaatgtagctacacttccaaatttagctattgtcctttgcggtccaaatgaaaatattaccttccgatctaacaatgttaaactagtcccaggcccttctatcgattgccagaatagactagactactacacagacacaccctctcaaatcaggccagctcctgcaacctgcacctacagtttgtcccctgggacaaatgaaaggacaggccctctttcccccccccccccaaatcagagcacacacagatcttggggtctggggcagaaatttcgttcatggaaaaaacaaacaaacaaacaaacacgatcaaaggaagctcgttccctttggcctcagggtttcttagacgccgtgttccc

SEQ ID NO: 525 - DNA, 1078 bp, synthetic construct
  source 1..1078: mol_type = other DNA
gagacagggcttaaaagtcctgggcaattagctgggcacagtgtcgtgcgcctgtaatcccacctagttgggaggctgaggcagaagaatctcttgaacccgaggtagaggttgcagtgagccgagatcgcgccactgcactccagcctggatgacagagtgagaccctgtctcaaaaaaaaaaaaagtcctgggcagcaaggcctccacttcaccccctaaaggttgccccaagagcaccgtgtgactgctaaggtatttccggagtctaaagacgattattcaggtctcatttgcatacccataatacactgcaaacagtatttttttcggaaaaacatttatatattgcttgacatttttaagtatgagaattttgcatgcagaatttttttgtataaactttctcaggtagtaacccttgggattagtagacaccatcagtgtactaggaattgcagttacccgaaaattgagttacagaagtaactggtaatgatagggacttagggtgatagaagtgcaaagcatgactgtcaaatttttggagcaggttttctgacttcggtcggaaaacccctataactggtaaccaaaagcagattactttcccccttgtggtcttcgcgtttgcggacgggagagaactttcggccattttccttttagaaatttaacttcttgaaggccaccaggtgacccttacttccctctcacctttccttctacctgtactttctctattaaaaagcctgcagaagtacccttgacaaattgccaaaaatgacacctaaaaaaaaaaaaaggaaaaacgacaccttaggtaattataggttgtaagaaaaagatttgacctcttggagtttttatttcttaataccaaaggacacccaaggaacgtatctctcaaaattgggtttcaaacctcagccgtttccttcttagttccagtgcttaacacgcaacagacctgcacaccactacactgcatacgagttttaaagttaataaatcagtcacccctccatagtcttctacctacttgaagacagaaacggctgctaggaagcaattcttc

SEQ ID NO: 526 - DNA, 1081 bp, synthetic construct
  source 1..1081: mol_type = other DNA
gagacagggcttaaaagtcctgggcaattagctgggcacagtgtcgtgcgcctgtaatcccacctagttgggaggctgaggcagaagaatctcttgaacccgaggtagaggttgcagtgagccgagatcgcgccactgcactccagcctggatgacagagtgagaccctgtctcaaaaaaaaaaaaagtcctgggcagcaaggcctccacttcaccccctaaaggttgccccaagagcaccgtgtgactgctaaggtatttccggagtctaaagacgattattcaggtctcatttgcatacccataatacactgcaaacagtatttttttcggaaaaacatttatatattgcttgacatttttaagtatgagaattttgcatgcagaatttttttgtataaactttctcaggtagtaacccttgggattagtagacaccatcagtgtactaggaattgcagttacccgaaaattgagttacagaagtaactggtaatgatagggacttagggtgatagaagtgcaaagcatgactgtcaaatttttggagcaggttttctgacttcggtcggaaaacccctctggggaataagagtggtttaaagaaagaacaatttgagagatctgcttagatctaataaaacccaagtatagtttctttagacgtcttatatctcacgtaggacctcttatttcagactcactgcaagaacaagctaaagaactatatacagtcaggaacaaggtgagccatcgcggttctcagtcccatgatcttaagagtttttcctcttcccctcttccctggctgtcctggagctcactctgtagaccaggctggtctcaaactcagaaatccacttacctctgcctcccaagggctgggattaaaggcatgcaccaccattgcccggcagggtatgtggactatgctgtccttcaactcagagatcgtggtactttaaatctcattttccgaaagaaaagaaaagaaaggaaggggggaaataaagccagtatattttgcacccacaatctgaagttctacaaatattgttagaaaatgcaaaggacccaagtc

SEQ ID NO: 527 - DNA, 1081 bp, synthetic construct
  source 1..1081: mol_type = other DNA
gagacagggcttaaaagtcctgggcaattagctgggcacagtgtcgtgcgcctgtaatcccacctagttgggaggctgaggcagaagaatctcttgaacccgaggtagaggttgcagtgagccgagatcgcgccactgcactccagcctggatgacagagtgagaccctgtctcaaaaaaaaaaaaagtcctgggcagcaaggcctccacttcaccccctaaaggttgccccaagagcaccgtgtgactgctaaggtatttccggagtctaaagacgattattcaggtctcatttgcatacccataatacactgcaaacagtatttttttcggaaaaacatttatatattgcttgacatttttaagtatgagaattttgcatgcagaatttttttgtataaactttctcaggtagtaacccttgggattagtagacaccatcagtgtactaggaattgcagttacccgaaaattgagttacagaagtaactggtaatgatagggacttagggtgatagaagtgcaaagcatgactgtcaaatttttggagcaggttttctgacttcggtcggaaaacccctctcggtttatcttaaagggttttaaatatagaaagcttccttagtcttatgggtgagagtgctgtttaagccttacctaggtatgtctttgaacatttattacagattgttatttgtgactatgaccactcaggtgttctgttcttgtgaatttagacacactcagaaaggctacacactcaaagaccacaccaaagtgaagtactatctgggccgtgaaactggtcacatatcagttattttgcagtaaaacaaggaagtcaatcatactgcttcagtgggtcagggagtcaagaatgcacagtacaagagctggtgagattcctcagcaggtaagagcactgaatgctcttccaaagattctgagttcaaatcccagcaaccacgtggtggatttgaacaaaggatgaaaacaaccatccataaccagatctgatgccctcttctggagtgtcaaaagacagctatggtgtacttacataaataaataagtaaaaaca

SEQ ID NO: 528 - DNA, 1081 bp, synthetic construct
  source 1..1081: mol_type = other DNA
gagacagggcttaaaagtcctgggcaattagctgggcacagtgtcgtgcgcctgtaatcccacctagttgggaggctgaggcagaagaatctcttgaacccgaggtagaggttgcagtgagccgagatcgcgccactgcactccagcctggatgacagagtgagaccctgtctcaaaaaaaaaaaaagtcctgggcagcaaggcctccacttcaccccctaaaggttgccccaagagcaccgtgtgactgctaaggtatttccggagtctaaagacgattattcaggtctcatttgcatacccataatacactgcaaacagtatttttttcggaaaaacatttatatattgcttgacatttttaagtatgagaattttgcatgcagaatttttttgtataaactttctcaggtagtaacccttgggattagtagacaccatcagtgtactaggaattgcagttacccgaaaattgagttacagaagtaactggtaatgatagggacttagggtgatagaagtgcaaagcatgactgtcaaatttttggagcaggttttctgacttcggtcggaaaacccctccacattttgtgtttaaaaatagaaatatttaagtgagatcagtttaaatctgctttatctagggtgtctaactgcttgcatctttttaacttttccttatttgtgagaaggtctgtaaaacttattatatgttagtacactgtagctgtcttcagacactccagaagagggattcagatcaccttacagatggttttgagccaccatgtggttgctgggatttgaactcaggacctttagaaaagtagttgggtgctcttacccgctgagccatctcaccagccctttttttttcttttttccagttcgggtttctctgtgtgtagccctggctgtcctggaactcattctgtagaccgggctggcctcgaactcagaaatctgcctgcctctgcctcccaagtgctgggattaaaggaatgtgccttcattgcccggctctagggctttttgttgttgtttgtttgtttgtttgtttgtttgcttttgtggatggcct

SEQ ID NO: 529 - DNA, 1081 bp, synthetic construct
  source 1..1081: mol_type = other DNA
gagacagggcttaaaagtcctgggcaattagctgggcacagtgtcgtgcgcctgtaatcccacctagttgggaggctgaggcagaagaatctcttgaacccgaggtagaggttgcagtgagccgagatcgcgccactgcactccagcctggatgacagagtgagaccctgtctcaaaaaaaaaaaaagtcctgggcagcaaggcctccacttcaccccctaaaggttgccccaagagcaccgtgtgactgctaaggtatttccggagtctaaagacgattattcaggtctcatttgcatacccataatacactgcaaacagtatttttttcggaaaaacatttatatattgcttgacatttttaagtatgagaattttgcatgcagaatttttttgtataaactttctcaggtagtaacccttgggattagtagacaccatcagtgtactaggaattgcagttacccgaaaattgagttacagaagtaactggtaatgatagggacttagggtgatagaagtgcaaagcatgactgtcaaatttttggagcaggttttctgacttcggtcggaaaacccctaaaaccagtaagggagaaaggtcaagtaacatataaaggaaggcctatcagaattacaccagacttttcaccagagactatgaaagccagaagagcctggacagatgttatacagacactaagagaacacaaatgccagcccaggctactatacctggccaaactctcaattaccatagatggagaaaccaaagtattccacgacaaaaacaaattcacacaatatctttccacgaatccagcccttcaaaggataatgacagaaaagaagcaatacaaggacggaaatcacgccctagaacaaccaagaaactaatcattcaacaaaccaaaaagaagacagccacaagaacagaatgccaactctaacaacaaaaataaaaggaagcaacaattacttttccttaatatctcttaatatcaatggactcaattccccaataaaaagacatagactaacagactggctacacaaacaggacccaacattctgctgctta

SEQ ID NO: 530 - DNA, 1081 bp, synthetic construct
  source 1..1081: mol_type = other DNA
gagacagggcttaaaagtcctgggcaattagctgggcacagtgtcgtgcgcctgtaatcccacctagttgggaggctgaggcagaagaatctcttgaacccgaggtagaggttgcagtgagccgagatcgcgccactgcactccagcctggatgacagagtgagaccctgtctcaaaaaaaaaaaaagtcctgggcagcaaggcctccacttcaccccctaaaggttgccccaagagcaccgtgtgactgctaaggtatttccggagtctaaagacgattattcaggtctcatttgcatacccataatacactgcaaacagtatttttttcggaaaaacatttatatattgcttgacatttttaagtatgagaattttgcatgcagaatttttttgtataaactttctcaggtagtaacccttgggattagtagacaccatcagtgtactaggaattgcagttacccgaaaattgagttacagaagtaactggtaatgatagggacttagggtgatagaagtgcaaagcatgactgtcaaatttttggagcaggttttctgacttcggtcggaaaacccctcccaatttcactggtctacaatgaaagcaaaacagttctcttccccgctccccggtgtgtgagaggggctttgatccttctctggtttcctaggaaacgcgtatgtgctagagccacgctctgagacttccgcctcgtgcggtcccgcttcctttctgcctcctctggcctgcatccgtgggggaggtggctggctgcagggttctccggatctcttctgtgttcccactactcaagcaccgagtggcgttctatggcgtccgcctcggctcagcccgcggccctgagcgcggagcaggccaagggtgaggaaagagcctagtctgggtgtgggccgtcttctggggggagggcgcgatactattctttgcctctccaagtggggcccttgcccattagggcgaagggttgggaggacaagcttatcgggttgcttgcaggcctcggcccactaattccctgcctcttccctcctctgggctcgcccgccgtcctccgcg

SEQ ID NO: 531 - DNA, 1081 bp, synthetic construct
  source 1..1081: mol_type = other DNA
gagacagggcttaaaagtcctgggcaattagctgggcacagtgtcgtgcgcctgtaatcccacctagttgggaggctgaggcagaagaatctcttgaacccgaggtagaggttgcagtgagccgagatcgcgccactgcactccagcctggatgacagagtgagaccctgtctcaaaaaaaaaaaaagtcctgggcagcaaggcctccacttcaccccctaaaggttgccccaagagcaccgtgtgactgctaaggtatttccggagtctaaagacgattattcaggtctcatttgcatacccataatacactgcaaacagtatttttttcggaaaaacatttatatattgcttgacatttttaagtatgagaattttgcatgcagaatttttttgtataaactttctcaggtagtaacccttgggattagtagacaccatcagtgtactaggaattgcagttacccgaaaattgagttacagaagtaactggtaatgatagggacttagggtgatagaagtgcaaagcatgactgtcaaatttttggagcaggttttctgacttcggtcggaaaacccctgaatttgttaaattacaggaggaagcttttttagttcattttacaaatactttcttgttaggtagataataccttctaaggttattatctggatcttctaagtctttttatcgctagcaagtctaagtttctggactttggaattagaagttaatgtcgtaggcgggcatggtggtccacgcctttaatcccagagtttgggaggcagacgcaggtggttttctgagttcgaggccatcctgctcttcaatgttagttccaggacagccagggttatacaaagaaaccctgtctcgagaaacaaaacaaacaaaaaaagagtagctgagtgctctgagttgtctctccagccccttagctatttattttcatttaaattatttttgttttattcgcttgtgtgcctgagtttgaatttcccgggattaacagttgaagactagggctggtgagatggctcagcggttaagattgccgactgctcttccaaaggtcctgag

SEQ ID NO: 532 - DNA, 1081 bp, synthetic construct
  source 1..1081: mol_type = other DNA
gagacagggcttaaaagtcctgggcaattagctgggcacagtgtcgtgcgcctgtaatcccacctagttgggaggctgaggcagaagaatctcttgaacccgaggtagaggttgcagtgagccgagatcgcgccactgcactccagcctggatgacagagtgagaccctgtctcaaaaaaaaaaaaagtcctgggcagcaaggcctccacttcaccccctaaaggttgccccaagagcaccgtgtgactgctaaggtatttccggagtctaaagacgattattcaggtctcatttgcatacccataatacactgcaaacagtatttttttcggaaaaacatttatatattgcttgacatttttaagtatgagaattttgcatgcagaatttttttgtataaactttctcaggtagtaacccttgggattagtagacaccatcagtgtactaggaattgcagttacccgaaaattgagttacagaagtaactggtaatgatagggacttagggtgatagaagtgcaaagcatgactgtcaaatttttggagcaggttttctgacttcggtcggaaaacccctaccccctaattctacaagaatagaaagcttagcagctcctctgaatggttgctctcaggtgctagtggttgcaagtcgtatgttgatgcctgcctttgccctacctggtgtgtgagcgtgagcgcgccccacctctccagcctctctcttactgtttttcagacaagatgggactgttgttctcctactgctatgtacctcaatttcaattgatcatgcctggacataactgcccatgttgtaaggtcgtctacgttgtaaggtcgtgctcagtttctgatgcctagactagtcacctttccgtttgcctcctgactgtgtaaatgaggcaaatgaaggtggtctcttaactgacatgttagtgtttgacctatgggatagtttctcattgttgagacagaatttctagaagctggtccgctgagcggctaagagcacttgctgatattgcaaaggatctacctgggtttggttctcagcactcacatggaagttcacat

SEQ ID NO: 533 - DNA, 648 bp, synthetic construct
  source 1..648: mol_type = other DNA
gagacagggcttaaaagtcctgggcaattagctgggcacagtgtcgtgcgcctgtaatcccacctagttgggaggctgaggcagaagaatctcttgaacccgaggtagaggttgcagtgagccgagatcgcgccactgcactccagcctggatgacagagtgagaccctgtctcaaaaaaaaaaaaagtcctgggcagcaaggcctccacttcaccccctaaaggttgccccaagagcaccgtgtgactgctaaggtatttccggagtctaaagacgattattcaggtctcatttgcatacccataatacactgcaaacagtatttttttcggaaaaacatttatatattgcttgacatttttaagtatgagaattttgcatgcagaatttttttgtataaactttctcaggtagtaacccttgggattagtagacaccatcagtgtactaggaattgcagttacccgaaaattgagttacagaagtaactggtaatgatagggacttagggtgatagaagtgcaaagcatgactgtcaaatttttggagcaggttttctgacttcggtcggaaaaccccttgtagttcctgcaatttaattttcgtttaaaactttattttattctttaacttaaaaaaaatatata

SEQ ID NO: 534 - DNA, 1087 bp, synthetic construct
  source 1..1087: mol_type = other DNA
cgactcgcaaccttttcggggtcccgagtccaacacccgtgggaatcccatgggcaccatggcccctcgctccaaaaatgctttcgcgtcgcgcagacactgctcggtagtttcggggatcagcgtttgagtaagagcccgcgtctgaaccctccgcgccgccccggccccagtggaaagacgcgcaggcaaaacgcaccacgtgacggagcgtgaccgcgcgccgagcgcgcgccaaggtcgggcaggaagagggcctatttcccatgattccttcatatttgcatatacgatacaaggctgttagagagataattagaattaatttgactgtaaacacaaagatattagtacaaaatacgtgacgtagaaagtaataatttcttgggtagtttgcagttttaaaattatgttttaaaatggactatcatatgcttaccgtaacttgaaagtatttcgatttcttggctttatatatcttgtggaaaggacgaaacaccaatgatagggacttagggtgatagaagtgcaaagcatgactgtcaaatttttggagcaggttttctgacttcggtcggaaaacccctactttctggagtttcaaaaacagactgtacgccaagggtcatatctttttttgtattggtttgtgtcttggttggtgtcttaggtgttaatcctacagtggagggtttatgggaataggaagtaacatgtcgcctgcatgtcataggagaaaaagcgagcatcagccgtatcggctttgtaacacaaattagctatcgtgaagtccgctcagctcttccctttctaccctggctgctttttgcagggattggtccgtggtctccagtctcttgggttctcaccctgtgtgaaaatcttcgtgtttttccctaccccccagtcacctcttacacagcctctgcttccaagcgcagcccccacaggagtttgtaggatttctgtgctagcggggaatgtgttctcacctcatagagccaggtagaaattatgcagatgggcagttctctgggaagaaagcagggcctttggggctctcagtgtccccgttgggttgtagaca

SEQ ID NO: 535 - DNA, 1087 bp, synthetic construct
  source 1..1087: mol_type = other DNA
cgactcgcaaccttttcggggtcccgagtccaacacccgtgggaatcccatgggcaccatggcccctcgctccaaaaatgctttcgcgtcgcgcagacactgctcggtagtttcggggatcagcgtttgagtaagagcccgcgtctgaaccctccgcgccgccccggccccagtggaaagacgcgcaggcaaaacgcaccacgtgacggagcgtgaccgcgcgccgagcgcgcgccaaggtcgggcaggaagagggcctatttcccatgattccttcatatttgcatatacgatacaaggctgttagagagataattagaattaatttgactgtaaacacaaagatattagtacaaaatacgtgacgtagaaagtaataatttcttgggtagtttgcagttttaaaattatgttttaaaatggactatcatatgcttaccgtaacttgaaagtatttcgatttcttggctttatatatcttgtggaaaggacgaaacaccaatgatagggacttagggtgatagaagtgcaaagcatgactgtcaaatttttggagcaggttttctgacttcggtcggaaaacccctactttctggagtttctaaaagtagactgtacgctaagggtcatatctttttttgttttggtttgtgtcttggttggcgtcttaaatgttaatcctacagtggagggctggcgaataggaagtaacatgtcgcctgcacgccataggagaaaaagcgagcatcagccgtatcggctttgtaacacaaattagctatcgtgaagtccgctcagctcttccctttctaccctggctgctttttgcagggattggtccgtggtctccagtctcttgggttctcaccctgtgtgaaaatcttcctgtttttccctaccccccaagtcacctcttacacagcctctgcttccaagcgcagcccccacaggagtttgtaggatttctgtgctagcggggagtgtgttctcacctcatagagccaggtagaaactacgcagatgggtgctgttctccaggaagaaagcagggcctttggggctctcagtgtccccgttgggttgtaga

SEQ ID NO: 536 - DNA, 1087 bp, synthetic construct
  source 1..1087: mol_type = other DNA
cgactcgcaaccttttcggggtcccgagtccaacacccgtgggaatcccatgggcaccatggcccctcgctccaaaaatgctttcgcgtcgcgcagacactgctcggtagtttcggggatcagcgtttgagtaagagcccgcgtctgaaccctccgcgccgccccggccccagtggaaagacgcgcaggcaaaacgcaccacgtgacggagcgtgaccgcgcgccgagcgcgcgccaaggtcgggcaggaagagggcctatttcccatgattccttcatatttgcatatacgatacaaggctgttagagagataattagaattaatttgactgtaaacacaaagatattagtacaaaatacgtgacgtagaaagtaataatttcttgggtagtttgcagttttaaaattatgttttaaaatggactatcatatgcttaccgtaacttgaaagtatttcgatttcttggctttatatatcttgtggaaaggacgaaacaccaatgatagggacttagggtgatagaagtgcaaagcatgactgtcaaatttttggagcaggttttctgacttcggtcggaaaacccctactttctggagtttcaaaaacagaccgtacgccaagggtcatgtcttttttcgtattggtttgtgtcttagttgttaatcctacagtggaggcctggggaataagaagtaacatgtggcctgcacgccataggagaaaaagcgagcatcagccgtatcggctttgtaacacaaattagctatcgtgaagtccgctcagctcttccatttctaccctggctgctttttgcagggattggtccgtggtctccagtctcttgggttctcaccctgtgtgaaaatcttcgtgtttttccctaccccccaagtcacctcttacacagcctctgcttccaagcgcagcccccacaggagtttgtaggatttctgtgctagcggggagtgtgttctcacctcatagagccaggtagaaattatgcagatgggcgctgttctctgggaagaaagcagggcctttggggctctcagtgtccccgttgggttgtagacataacactctta

SEQ ID NO: 537 - DNA, 891 bp, synthetic construct
  source 1..891: mol_type = other DNA
cgactcgcaaccttttcggggtcccgagtccaacacccgtgggaatcccatgggcaccatggcccctcgctccaaaaatgctttcgcgtcgcgcagacactgctcggtagtttcggggatcagcgtttgagtaagagcccgcgtctgaaccctccgcgccgccccggccccagtggaaagacgcgcaggcaaaacgcaccacgtgacggagcgtgaccgcgcgccgagcgcgcgccaaggtcgggcaggaagagggcctatttcccatgattccttcatatttgcatatacgatacaaggctgttagagagataattagaattaatttgactgtaaacacaaagatattagtacaaaatacgtgacgtagaaagtaataatttcttgggtagtttgcagttttaaaattatgttttaaaatggactatcatatgcttaccgtaacttgaaagtatttcgatttcttggctttatatatcttgtggaaaggacgaaacaccaatgatagggacttagggtgatagaagtgcaaagcatgactgtcaaatttttggagcaggttttctgacttcggtcggaaaacccctcctccggggatacaacgtgtttcctaaaagtagagggaggtaagagacggtagcacctgcggggcggcttgcacgccgagtgcctgtgacgcgccggcttaacttaactgcttccctgaagtaccttgaggttcctgatgtgcgggcggtagacggtaggcttatgcggcacgctgtcgtttccaccgtggctactgcgctttgggaaggccacgacctcctcctttggggaggtccttaggatctcagcttggcagtcgagtgggtggcgaccttttaaaggaatgggacccacccggagttc

SEQ ID NO: 538 - DNA, 1079 bp, synthetic construct
  source 1..1079: mol_type = other DNA
cgactcgcaaccttttcggggtcccgagtccaacacccgtgggaatcccatgggcaccatggcccctcgctccaaaaatgctttcgcgtcgcgcagacactgctcggtagtttcggggatcagcgtttgagtaagagcccgcgtctgaaccctccgcgccgccccggccccagtggaaagacgcgcaggcaaaacgcaccacgtgacggagcgtgaccgcgcgccgagcgcgcgccaaggtcgggcaggaagagggcctatttcccatgattccttcatatttgcatatacgatacaaggctgttagagagataattagaattaatttgactgtaaacacaaagatattagtacaaaatacgtgacgtagaaagtaataatttcttgggtagtttgcagttttaaaattatgttttaaaatggactatcatatgcttaccgtaacttgaaagtatttcgatttcttggctttatatatcttgtggaaaggacgaaacaccaatgatagggacttagggtgatagaagtgcaaagcatgactgtcaaatttttggagcaggttttctgacttcggtcggaaaacccctttcccttcttgtaatacaaaataataacaaccacagaggacatcgcaagtaaaatgtgtataacaaccccatctaaagaaccctatcatctttctactatctgtctacctaaatatgtatagtataaataaccctatatagcactctaagcaacttaagttaggtaacttagaaaactcttttttttttttgagactgagtctcactctgtcgcacccaggctggagtgcagtggcgtgatctcggctcactgcaacctccaccttctgggttcaagtgattctcccatctcagtctcccaagtagctgggattacaggcacgccaccatgccctgctacatttttttttttttagtagagatgaggtttcaccacattggccaggctgttctcgaactcctgacctcaggtgatccgcccaccttggcctcatgaagtgctgggattacaggtgtgagccactgtacccagccagaaaactcttaaaaaac

SEQ ID NO: 539 - DNA, 969 bp, synthetic construct
  source 1..969: mol_type = other DNA
cgactcgcaaccttttcggggtcccgagtccaacacccgtgggaatcccatgggcaccatggcccctcgctccaaaaatgctttcgcgtcgcgcagacactgctcggtagtttcggggatcagcgtttgagtaagagcccgcgtctgaaccctccgcgccgccccggccccagtggaaagacgcgcaggcaaaacgcaccacgtgacggagcgtgaccgcgcgccgagcgcgcgccaaggtcgggcaggaagagggcctatttcccatgattccttcatatttgcatatacgatacaaggctgttagagagataattagaattaatttgactgtaaacacaaagatattagtacaaaatacgtgacgtagaaagtaataatttcttgggtagtttgcagttttaaaattatgttttaaaatggactatcatatgcttaccgtaacttgaaagtatttcgatttcttggctttatatatcttgtggaaaggacgaaacaccaatgatagggacttagggtgatagaagtgcaaagcatgactgtcaaatttttggagcaggttttctgacttcggtcggaaaacccctctgaattttcttgcagttgaacaacagaggctttttttgtgtgtgtgggggtgcttggttttgggaggttgaagagtacttgttcgcaaactctctaaatgagagatggggaagtgtcttaccagctgattcgcgagagcacctgcaagtttacctgttttagtgatttgcgtttatgaaagttggagttgctgattttgtgatctctacttttaaggtaaaagcagggcggtgttgacttttcttgccagttggctgtcctgttttctttctcgcactgttttctttttgagacgaagtctgtcgctcaggctggagtgcactggcgtgatctcggctcgctgcaaactttgccgaacccctgtttagcgatttccgtttg

SEQ ID NO: 540 - DNA, 1087 bp, synthetic construct
  source 1..1087: mol_type = other DNA
cgactcgcaaccttttcggggtcccgagtccaacacccgtgggaatcccatgggcaccatggcccctcgctccaaaaatgctttcgcgtcgcgcagacactgctcggtagtttcggggatcagcgtttgagtaagagcccgcgtctgaaccctccgcgccgccccggccccagtggaaagacgcgcaggcaaaacgcaccacgtgacggagcgtgaccgcgcgccgagcgcgcgccaaggtcgggcaggaagagggcctatttcccatgattccttcatatttgcatatacgatacaaggctgttagagagataattagaattaatttgactgtaaacacaaagatattagtacaaaatacgtgacgtagaaagtaataatttcttgggtagtttgcagttttaaaattatgttttaaaatggactatcatatgcttaccgtaacttgaaagtatttcgatttcttggctttatatatcttgtggaaaggacgaaacaccaatgatagggacttagggtgatagaagtgcaaagcatgactgtcaaatttttggagcaggttttctgacttcggtcggaaaacccctatatgtggtaatccaacaatagaaattatttttaagtttgtgtgttcctttttctgttcaatggtgcttttgatattgttgtaaagcagtgactagcagattctgtgtggtaaaagcactgaaccctgtttagttcttttctccctaccttattggtaattatttctgtgtatatatgttccaaagaaatgcggcttgtatattcatgcttttcaactttttgtgatagacagttgatacacaagtagtacctcctccgggatcttcttagtcaagactgtttggtagatgcatgttttttgttacttgtaatgtacagtattcagttcattttctttttgcagcactgtccggttgaaacacaacgcgaggatcgggcgtggtggctcacgcctgtaatcccagcactttgggaggccgaggcaggacaatcaagaccaatcctggtcatcaaggcaggagaatcaagaccatcgaggtcaggagatcaagaccatcct

SEQ ID NO: 541 - DNA, 1085 bp, synthetic construct
  source 1..1085: mol_type = other DNA
cgactcgcaaccttttcggggtcccgagtccaacacccgtgggaatcccatgggcaccatggcccctcgctccaaaaatgctttcgcgtcgcgcagacactgctcggtagtttcggggatcagcgtttgagtaagagcccgcgtctgaaccctccgcgccgccccggccccagtggaaagacgcgcaggcaaaacgcaccacgtgacggagcgtgaccgcgcgccgagcgcgcgccaaggtcgggcaggaagagggcctatttcccatgattccttcatatttgcatatacgatacaaggctgttagagagataattagaattaatttgactgtaaacacaaagatattagtacaaaatacgtgacgtagaaagtaataatttcttgggtagtttgcagttttaaaattatgttttaaaatggactatcatatgcttaccgtaacttgaaagtatttcgatttcttggctttatatatcttgtggaaaggacgaaacaccaatgatagggacttagggtgatagaagtgcaaagcatgactgtcaaatttttggagcaggttttctgacttcggtcggaaaacccctacatcaggttgtttttctgtttttacatcaggttgtttttctgtttggttttttttttacaccacgtttatacgccggtgcacggtttaccactgaaaacacctttcatctacaggtgatatcttttaacacaaataaaatgtagtagtcctaggagacggaatagaaggaggtggggcctaggcagattcatctctgcggtgcattttgcctctggccctcgggccctagtttgcgatctttcccatcttgcctctgcttccctctgcacaatcctgagtattgcagtaccttacacttaaggaaatttcgtcttgccaaagttgatccatttcagctccgaaacataacaggaactagtgcaacgataaacgtatgaggaacttgcaataagagtgacagaatcctttgaatcaaaaaaaaaaaaagccaccacttaatgagtatctaccatatgtcaagggcttcaccaatatttcattgaaatattccagacca

SEQ ID NO: 542 - DNA, 1087 bp, synthetic construct
  source 1..1087: mol_type = other DNA
cgactcgcaaccttttcggggtcccgagtccaacacccgtgggaatcccatgggcaccatggcccctcgctccaaaaatgctttcgcgtcgcgcagacactgctcggtagtttcggggatcagcgtttgagtaagagcccgcgtctgaaccctccgcgccgccccggccccagtggaaagacgcgcaggcaaaacgcaccacgtgacggagcgtgaccgcgcgccgagcgcgcgccaaggtcgggcaggaagagggcctatttcccatgattccttcatatttgcatatacgatacaaggctgttagagagataattagaattaatttgactgtaaacacaaagatattagtacaaaatacgtgacgtagaaagtaataatttcttgggtagtttgcagttttaaaattatgttttaaaatggactatcatatgcttaccgtaacttgaaagtatttcgatttcttggctttatatatcttgtggaaaggacgaaacaccaatgatagggacttagggtgatagaagtgcaaagcatgactgtcaaatttttggagcaggttttctgacttcggtcggaaaacccctcttatgatgtttgttgccaatgatagattgttttcactgtgcaaaaattatgggtagttttggtggtcttgatgcagttgtaagcttggggtatgaaggtttgggccacgcctgggcgcttccggctgcgccggatgctgtttcctttccgctcccaggggcgttgggaacggttgtaggacgtggctctttattcgtgagttttccatttacctccgctgaacctagagcttcagacgccctatggcgtccgcctcgacccaaccggcggccttgagcgctgagcaagcaaagggtgagaatcgtcctagtcaaggcataggctgctggcctggggtagtcaaggcatgggctgctggtctggggaggatgcgggcggaggatgtggggcgacaaacctggctacgtccgccgggaaaatggggtaggggacgccgggtaccgtccttctaagtggggcgcttgcccccaagacttgggatcttattgggttacctaca

SEQ ID NO: 543 - DNA, 1085 bp, synthetic construct
  source 1..1085: mol_type = other DNA
cgactcgcaaccttttcggggtcccgagtccaacacccgtgggaatcccatgggcaccatggcccctcgctccaaaaatgctttcgcgtcgcgcagacactgctcggtagtttcggggatcagcgtttgagtaagagcccgcgtctgaaccctccgcgccgccccggccccagtggaaagacgcgcaggcaaaacgcaccacgtgacggagcgtgaccgcgcgccgagcgcgcgccaaggtcgggcaggaagagggcctatttcccatgattccttcatatttgcatatacgatacaaggctgttagagagataattagaattaatttgactgtaaacacaaagatattagtacaaaatacgtgacgtagaaagtaataatttcttgggtagtttgcagttttaaaattatgttttaaaatggactatcatatgcttaccgtaacttgaaagtatttcgatttcttggctttatatatcttgtggaaaggacgaaacaccaatgatagggacttagggtgatagaagtgcaaagcatgactgtcaaatttttggagcaggttttctgacttcggtcggaaaaccccttctttactgttatatgttaggcgaaatattacgcgtttggagtaagtggtgctttttgtaactgaaaagagattctgtgtgtgtttttttttttttagaggctgcatagttatttgtatgaaccgcaggtgacctaattagcaaggtaattcagacctgtatcctagcacttaagaagtggaagtgggataaccctgcgtgttctcgtgtgggaggctagcttaagcaacaaagcaggaaggccccaccaacaaaagaatttaaaaattatacgtgcgtggtggcgcgcgtatgaggaaattatttggcaactgtgttacagtatagcagcaaatggaatagacctagtccctgactttaggagacctgcctcagccccccgaatggctgggactacaggcgtgcgcctccgcgcccagctaatttttgcatttttggtagagacgggttcaccatgttggccaggatggtctccatctcttcatctggtgatccgcc

SEQ ID NO: 544 - DNA, 1087 bp, synthetic construct
  source 1..1087: mol_type = other DNA
cgactcgcaaccttttcggggtcccgagtccaacacccgtgggaatcccatgggcaccatggcccctcgctccaaaaatgctttcgcgtcgcgcagacactgctcggtagtttcggggatcagcgtttgagtaagagcccgcgtctgaaccctccgcgccgccccggccccagtggaaagacgcgcaggcaaaacgcaccacgtgacggagcgtgaccgcgcgccgagcgcgcgccaaggtcgggcaggaagagggcctatttcccatgattccttcatatttgcatatacgatacaaggctgttagagagataattagaattaatttgactgtaaacacaaagatattagtacaaaatacgtgacgtagaaagtaataatttcttgggtagtttgcagttttaaaattatgttttaaaatggactatcatatgcttaccgtaacttgaaagtatttcgatttcttggctttatatatcttgtggaaaggacgaaacaccaatgatagggacttagggtgatagaagtgcaaagcatgactgtcaaatttttggagcaggttttctgacttcggtcggaaaacccctaccttattcacgcctaaaaagtagactgactgtggggtggtcgtgttttttgtttcttgttggtaggtggtgaatgcgtttttttcgttgttttctccgttactcaggctgccagttgcttggcagtcttgtcgctggctgtggacgctctgcacttcatcaccgtccccagctgcgctttgagccggtctaaggttgcccacagtattgacgttgggacccacgaaactggcaatttccatgtgtgcggccttacccagttctcccaaacttctgcgtataaccgcttctctgtgcttcagaaagataagtccggccccggcctcacacagcagctcagttcgtgacagcgtttaatatgtaaaatggagcaaataatttatagggcgttgggagagttaaagagactaattcatttacgtgttaaatacagggaatggcttttgcattgatataaccccagcctccagcatgcgccagacctgacgtaggtgttcggc

SEQ ID NO: 545 - DNA, 1087 bp, synthetic construct
  source 1..1087: mol_type = other DNA
cgactcgcaaccttttcggggtcccgagtccaacacccgtgggaatcccatgggcaccatggcccctcgctccaaaaatgctttcgcgtcgcgcagacactgctcggtagtttcggggatcagcgtttgagtaagagcccgcgtctgaaccctccgcgccgccccggccccagtggaaagacgcgcaggcaaaacgcaccacgtgacggagcgtgaccgcgcgccgagcgcgcgccaaggtcgggcaggaagagggcctatttcccatgattccttcatatttgcatatacgatacaaggctgttagagagataattagaattaatttgactgtaaacacaaagatattagtacaaaatacgtgacgtagaaagtaataatttcttgggtagtttgcagttttaaaattatgttttaaaatggactatcatatgcttaccgtaacttgaaagtatttcgatttcttggctttatatatcttgtggaaaggacgaaacaccaatgatagggacttagggtgatagaagtgcaaagcatgactgtcaaatttttggagcaggttttctgacttcggtcggaaaaccccttttgacccattacccatctaagttagatgcttttttaaatgttttttaatttttaaatttttaatttttttcattatttattttttatttttgagacggatctcggctcactgtaacctccacctcccgggttcaagcgattctcctgactcagcctcccgagtagctgggattacaggcgcgcgccaccatgcccggctaatttttctatttttagtaaagacggggtttcgccatgttgaccagggtggtcttgaactcctgacgtcaggtgatcctcctgcctcgtgctgggattgcaggcgtgagccaccgctcccggcccttagatgctttttaatcagcaagtacgcaatgctttcctgacaggaatgtcaagtccgtcaggaaatccacataagggtgttaagcaggcaaagtaccacatacagattaaaatcaaaagcactgtcaacgcttatttaatttatacagtagaccctaacttttctaattttgtg

SEQ ID NO: 546 - DNA, 1087 bp, synthetic construct
  source 1..1087: mol_type = other DNA
cgactcgcaaccttttcggggtcccgagtccaacacccgtgggaatcccatgggcaccatggcccctcgctccaaaaatgctttcgcgtcgcgcagacactgctcggtagtttcggggatcagcgtttgagtaagagcccgcgtctgaaccctccgcgccgccccggccccagtggaaagacgcgcaggcaaaacgcaccacgtgacggagcgtgaccgcgcgccgagcgcgcgccaaggtcgggcaggaagagggcctatttcccatgattccttcatatttgcatatacgatacaaggctgttagagagataattagaattaatttgactgtaaacacaaagatattagtacaaaatacgtgacgtagaaagtaataatttcttgggtagtttgcagttttaaaattatgttttaaaatggactatcatatgcttaccgtaacttgaaagtatttcgatttcttggctttatatatcttgtggaaaggacgaaacaccaatgatagggacttagggtgatagaagtgcaaagcatgactgtcaaatttttggagcaggttttctgacttcggtcggaaaacccctgtttacttggttttaaaaatagcttgcactagcgataccgcgaatatggttattaggtttgttaggcacagtcgtgtcttactatagaaaaataacgtagtgttcattttgctgcctgtatgtgttaatttgtccttattgcgccattgttcttgttaagtcttctgtaaggagttgcgggtttcaaactgtcagtctgagagcataagctcacttttcagtcagttgaattgaatgttacattcgattggttctggatattgatattacccaaggcttgtcctgtttgtaagtcttttcctacacctgacaatatgattatgtttacaatgtccctagaactctgggtgtatcgttcccactgaataaaatttgatctctaagttgacctataaatttaagtaccaaaaaactggtttgtaagattttggaaggcagaggcagggaagagaccaacgtggtctacatataaagtaccaggtacatataaagtaccaggt

SEQ ID NO: 547 - DNA, 1083 bp, synthetic construct
  source 1..1083: mol_type = other DNA
cgactcgcaaccttttcggggtcccgagtccaacacccgtgggaatcccatgggcaccatggcccctcgctccaaaaatgctttcgcgtcgcgcagacactgctcggtagtttcggggatcagcgtttgagtaagagcccgcgtctgaaccctccgcgccgccccggccccagtggaaagacgcgcaggcaaaacgcaccacgtgacggagcgtgaccgcgcgccgagcgcgcgccaaggtcgggcaggaagagggcctatttcccatgattccttcatatttgcatatacgatacaaggctgttagagagataattagaattaatttgactgtaaacacaaagatattagtacaaaatacgtgacgtagaaagtaataatttcttgggtagtttgcagttttaaaattatgttttaaaatggactatcatatgcttaccgtaacttgaaagtatttcgatttcttggctttatatatcttgtggaaaggacgaaacaccaatgatagggacttagggtgatagaagtgcaaagcatgactgtcaaatttttggagcaggttttctgacttcggtcggaaaacccctatttttgtggtgctaaaagttagattgcattccgcccttctcacgtctctttacgtgttgtttgcgaggcgtggcctcggaggtaaatggtctccttttacctcagataagcttacctttgctctgtgagtaagaatgtagctacacttccaaatttagctattgtcctttgcggtccaaatgaaaatattaccttccgatctaacaatgttaaactagtcccaggcccttctatcgattgccagaatagactagactactacacagacacaccctctcaaatcaggccagctcctgcaacctgcacctacagtttgtcccctgggacaaatgaaaggacaggccctctttcccccccccccccaaatcagagcacacacagatcttggggtctggggcagaaatttcgttcatggaaaaaacaaacaaacaaacaaacacgatcaaaggaagctcgttccctttggcctcagggtttcttagacgccgtgttccc

SEQ ID NO: 548 - DNA, 1084 bp, synthetic construct
  source 1..1084: mol_type = other DNA
cgactcgcaaccttttcggggtcccgagtccaacacccgtgggaatcccatgggcaccatggcccctcgctccaaaaatgctttcgcgtcgcgcagacactgctcggtagtttcggggatcagcgtttgagtaagagcccgcgtctgaaccctccgcgccgccccggccccagtggaaagacgcgcaggcaaaacgcaccacgtgacggagcgtgaccgcgcgccgagcgcgcgccaaggtcgggcaggaagagggcctatttcccatgattccttcatatttgcatatacgatacaaggctgttagagagataattagaattaatttgactgtaaacacaaagatattagtacaaaatacgtgacgtagaaagtaataatttcttgggtagtttgcagttttaaaattatgttttaaaatggactatcatatgcttaccgtaacttgaaagtatttcgatttcttggctttatatatcttgtggaaaggacgaaacaccaatgatagggacttagggtgatagaagtgcaaagcatgactgtcaaatttttggagcaggttttctgacttcggtcggaaaacccctataactggtaaccaaaagcagattactttcccccttgtggtcttcgcgtttgcggacgggagagaactttcggccattttccttttagaaatttaacttcttgaaggccaccaggtgacccttacttccctctcacctttccttctacctgtactttctctattaaaaagcctgcagaagtacccttgacaaattgccaaaaatgacacctaaaaaaaaaaaaaggaaaaacgacaccttaggtaattataggttgtaagaaaaagatttgacctcttggagtttttatttcttaataccaaaggacacccaaggaacgtatctctcaaaattgggtttcaaacctcagccgtttccttcttagttccagtgcttaacacgcaacagacctgcacaccactacactgcatacgagttttaaagttaataaatcagtcacccctccatagtcttctacctacttgaagacagaaacggctgctaggaagcaattcttc

SEQ ID NO: 549 - DNA, 1087 bp, synthetic construct
  source 1..1087: mol_type = other DNA
cgactcgcaaccttttcggggtcccgagtccaacacccgtgggaatcccatgggcaccatggcccctcgctccaaaaatgctttcgcgtcgcgcagacactgctcggtagtttcggggatcagcgtttgagtaagagcccgcgtctgaaccctccgcgccgccccggccccagtggaaagacgcgcaggcaaaacgcaccacgtgacggagcgtgaccgcgcgccgagcgcgcgccaaggtcgggcaggaagagggcctatttcccatgattccttcatatttgcatatacgatacaaggctgttagagagataattagaattaatttgactgtaaacacaaagatattagtacaaaatacgtgacgtagaaagtaataatttcttgggtagtttgcagttttaaaattatgttttaaaatggactatcatatgcttaccgtaacttgaaagtatttcgatttcttggctttatatatcttgtggaaaggacgaaacaccaatgatagggacttagggtgatagaagtgcaaagcatgactgtcaaatttttggagcaggttttctgacttcggtcggaaaacccctctggggaataagagtggtttaaagaaagaacaatttgagagatctgcttagatctaataaaacccaagtatagtttctttagacgtcttatatctcacgtaggacctcttatttcagactcactgcaagaacaagctaaagaactatatacagtcaggaacaaggtgagccatcgcggttctcagtcccatgatcttaagagtttttcctcttcccctcttccctggctgtcctggagctcactctgtagaccaggctggtctcaaactcagaaatccacttacctctgcctcccaagggctgggattaaaggcatgcaccaccattgcccggcagggtatgtggactatgctgtccttcaactcagagatcgtggtactttaaatctcattttccgaaagaaaagaaaagaaaggaaggggggaaataaagccagtatattttgcacccacaatctgaagttctacaaatattgttagaaaatgcaaaggacccaagtc

SEQ ID NO: 550 - DNA, 1087 bp, synthetic construct
  source 1..1087: mol_type = other DNA
cgactcgcaaccttttcggggtcccgagtccaacacccgtgggaatcccatgggcaccatggcccctcgctccaaaaatgctttcgcgtcgcgcagacactgctcggtagtttcggggatcagcgtttgagtaagagcccgcgtctgaaccctccgcgccgccccggccccagtggaaagacgcgcaggcaaaacgcaccacgtgacggagcgtgaccgcgcgccgagcgcgcgccaaggtcgggcaggaagagggcctatttcccatgattccttcatatttgcatatacgatacaaggctgttagagagataattagaattaatttgactgtaaacacaaagatattagtacaaaatacgtgacgtagaaagtaataatttcttgggtagtttgcagttttaaaattatgttttaaaatggactatcatatgcttaccgtaacttgaaagtatttcgatttcttggctttatatatcttgtggaaaggacgaaacaccaatgatagggacttagggtgatagaagtgcaaagcatgactgtcaaatttttggagcaggttttctgacttcggtcggaaaacccctctcggtttatcttaaagggttttaaatatagaaagcttccttagtcttatgggtgagagtgctgtttaagccttacctaggtatgtctttgaacatttattacagattgttatttgtgactatgaccactcaggtgttctgttcttgtgaatttagacacactcagaaaggctacacactcaaagaccacaccaaagtgaagtactatctgggccgtgaaactggtcacatatcagttattttgcagtaaaacaaggaagtcaatcatactgcttcagtgggtcagggagtcaagaatgcacagtacaagagctggtgagattcctcagcaggtaagagcactgaatgctcttccaaagattctgagttcaaatcccagcaaccacgtggtggatttgaacaaaggatgaaaacaaccatccataaccagatctgatgccctcttctggagtgtcaaaagacagctatggtgtacttacataaataaataagtaaaaaca

SEQ ID NO: 551 - DNA, 1087 bp, synthetic construct
  source 1..1087: mol_type = other DNA
cgactcgcaaccttttcggggtcccgagtccaacacccgtgggaatcccatgggcaccatggcccctcgctccaaaaatgctttcgcgtcgcgcagacactgctcggtagtttcggggatcagcgtttgagtaagagcccgcgtctgaaccctccgcgccgccccggccccagtggaaagacgcgcaggcaaaacgcaccacgtgacggagcgtgaccgcgcgccgagcgcgcgccaaggtcgggcaggaagagggcctatttcccatgattccttcatatttgcatatacgatacaaggctgttagagagataattagaattaatttgactgtaaacacaaagatattagtacaaaatacgtgacgtagaaagtaataatttcttgggtagtttgcagttttaaaattatgttttaaaatggactatcatatgcttaccgtaacttgaaagtatttcgatttcttggctttatatatcttgtggaaaggacgaaacaccaatgatagggacttagggtgatagaagtgcaaagcatgactgtcaaatttttggagcaggttttctgacttcggtcggaaaacccctccacattttgtgtttaaaaatagaaatatttaagtgagatcagtttaaatctgctttatctagggtgtctaactgcttgcatctttttaacttttccttatttgtgagaaggtctgtaaaacttattatatgttagtacactgtagctgtcttcagacactccagaagagggattcagatcaccttacagatggttttgagccaccatgtggttgctgggatttgaactcaggacctttagaaaagtagttgggtgctcttacccgctgagccatctcaccagccctttttttttcttttttccagttcgggtttctctgtgtgtagccctggctgtcctggaactcattctgtagaccgggctggcctcgaactcagaaatctgcctgcctctgcctcccaagtgctgggattaaaggaatgtgccttcattgcccggctctagggctttttgttgttgtttgtttgtttgtttgtttgtttgcttttgtggatggcct

SEQ ID NO: 552 - DNA, 1087 bp, synthetic construct
  source 1..1087: mol_type = other DNA
cgactcgcaaccttttcggggtcccgagtccaacacccgtgggaatcccatgggcaccatggcccctcgctccaaaaatgctttcgcgtcgcgcagacactgctcggtagtttcggggatcagcgtttgagtaagagcccgcgtctgaaccctccgcgccgccccggccccagtggaaagacgcgcaggcaaaacgcaccacgtgacggagcgtgaccgcgcgccgagcgcgcgccaaggtcgggcaggaagagggcctatttcccatgattccttcatatttgcatatacgatacaaggctgttagagagataattagaattaatttgactgtaaacacaaagatattagtacaaaatacgtgacgtagaaagtaataatttcttgggtagtttgcagttttaaaattatgttttaaaatggactatcatatgcttaccgtaacttgaaagtatttcgatttcttggctttatatatcttgtggaaaggacgaaacaccaatgatagggacttagggtgatagaagtgcaaagcatgactgtcaaatttttggagcaggttttctgacttcggtcggaaaacccctaaaaccagtaagggagaaaggtcaagtaacatataaaggaaggcctatcagaattacaccagacttttcaccagagactatgaaagccagaagagcctggacagatgttatacagacactaagagaacacaaatgccagcccaggctactatacctggccaaactctcaattaccatagatggagaaaccaaagtattccacgacaaaaacaaattcacacaatatctttccacgaatccagcccttcaaaggataatgacagaaaagaagcaatacaaggacggaaatcacgccctagaacaaccaagaaactaatcattcaacaaaccaaaaagaagacagccacaagaacagaatgccaactctaacaacaaaaataaaaggaagcaacaattacttttccttaatatctcttaatatcaatggactcaattccccaataaaaagacatagactaacagactggctacacaaacaggacccaacattctgctgctta

SEQ ID NO: 553 - DNA, 1087 bp, synthetic construct
  source 1..1087: mol_type = other DNA
cgactcgcaaccttttcggggtcccgagtccaacacccgtgggaatcccatgggcaccatggcccctcgctccaaaaatgctttcgcgtcgcgcagacactgctcggtagtttcggggatcagcgtttgagtaagagcccgcgtctgaaccctccgcgccgccccggccccagtggaaagacgcgcaggcaaaacgcaccacgtgacggagcgtgaccgcgcgccgagcgcgcgccaaggtcgggcaggaagagggcctatttcccatgattccttcatatttgcatatacgatacaaggctgttagagagataattagaattaatttgactgtaaacacaaagatattagtacaaaatacgtgacgtagaaagtaataatttcttgggtagtttgcagttttaaaattatgttttaaaatggactatcatatgcttaccgtaacttgaaagtatttcgatttcttggctttatatatcttgtggaaaggacgaaacaccaatgatagggacttagggtgatagaagtgcaaagcatgactgtcaaatttttggagcaggttttctgacttcggtcggaaaacccctcccaatttcactggtctacaatgaaagcaaaacagttctcttccccgctccccggtgtgtgagaggggctttgatccttctctggtttcctaggaaacgcgtatgtgctagagccacgctctgagacttccgcctcgtgcggtcccgcttcctttctgcctcctctggcctgcatccgtgggggaggtggctggctgcagggttctccggatctcttctgtgttcccactactcaagcaccgagtggcgttctatggcgtccgcctcggctcagcccgcggccctgagcgcggagcaggccaagggtgaggaaagagcctagtctgggtgtgggccgtcttctggggggagggcgcgatactattctttgcctctccaagtggggcccttgcccattagggcgaagggttgggaggacaagcttatcgggttgcttgcaggcctcggcccactaattccctgcctcttccctcctctgggctcgcccgccgtcctccgcg

SEQ ID NO: 554 - DNA, 1087 bp, synthetic construct
  source 1..1087: mol_type = other DNA
cgactcgcaaccttttcggggtcccgagtccaacacccgtgggaatcccatgggcaccatggcccctcgctccaaaaatgctttcgcgtcgcgcagacactgctcggtagtttcggggatcagcgtttgagtaagagcccgcgtctgaaccctccgcgccgccccggccccagtggaaagacgcgcaggcaaaacgcaccacgtgacggagcgtgaccgcgcgccgagcgcgcgccaaggtcgggcaggaagagggcctatttcccatgattccttcatatttgcatatacgatacaaggctgttagagagataattagaattaatttgactgtaaacacaaagatattagtacaaaatacgtgacgtagaaagtaataatttcttgggtagtttgcagttttaaaattatgttttaaaatggactatcatatgcttaccgtaacttgaaagtatttcgatttcttggctttatatatcttgtggaaaggacgaaacaccaatgatagggacttagggtgatagaagtgcaaagcatgactgtcaaatttttggagcaggttttctgacttcggtcggaaaacccctgaatttgttaaattacaggaggaagcttttttagttcattttacaaatactttcttgttaggtagataataccttctaaggttattatctggatcttctaagtctttttatcgctagcaagtctaagtttctggactttggaattagaagttaatgtcgtaggcgggcatggtggtccacgcctttaatcccagagtttgggaggcagacgcaggtggttttctgagttcgaggccatcctgctcttcaatgttagttccaggacagccagggttatacaaagaaaccctgtctcgagaaacaaaacaaacaaaaaaagagtagctgagtgctctgagttgtctctccagccccttagctatttattttcatttaaattatttttgttttattcgcttgtgtgcctgagtttgaatttcccgggattaacagttgaagactagggctggtgagatggctcagcggttaagattgccgactgctcttccaaaggtcctgag

SEQ ID NO: 555 - DNA, 1087 bp, synthetic construct
  source 1..1087: mol_type = other DNA
cgactcgcaaccttttcggggtcccgagtccaacacccgtgggaatcccatgggcaccatggcccctcgctccaaaaatgctttcgcgtcgcgcagacactgctcggtagtttcggggatcagcgtttgagtaagagcccgcgtctgaaccctccgcgccgccccggccccagtggaaagacgcgcaggcaaaacgcaccacgtgacggagcgtgaccgcgcgccgagcgcgcgccaaggtcgggcaggaagagggcctatttcccatgattccttcatatttgcatatacgatacaaggctgttagagagataattagaattaatttgactgtaaacacaaagatattagtacaaaatacgtgacgtagaaagtaataatttcttgggtagtttgcagttttaaaattatgttttaaaatggactatcatatgcttaccgtaacttgaaagtatttcgatttcttggctttatatatcttgtggaaaggacgaaacaccaatgatagggacttagggtgatagaagtgcaaagcatgactgtcaaatttttggagcaggttttctgacttcggtcggaaaacccctaccccctaattctacaagaatagaaagcttagcagctcctctgaatggttgctctcaggtgctagtggttgcaagtcgtatgttgatgcctgcctttgccctacctggtgtgtgagcgtgagcgcgccccacctctccagcctctctcttactgtttttcagacaagatgggactgttgttctcctactgctatgtacctcaatttcaattgatcatgcctggacataactgcccatgttgtaaggtcgtctacgttgtaaggtcgtgctcagtttctgatgcctagactagtcacctttccgtttgcctcctgactgtgtaaatgaggcaaatgaaggtggtctcttaactgacatgttagtgtttgacctatgggatagtttctcattgttgagacagaatttctagaagctggtccgctgagcggctaagagcacttgctgatattgcaaaggatctacctgggtttggttctcagcactcacatggaagttcacat

SEQ ID NO: 556 - DNA, 654 bp, synthetic construct
  source 1..654: mol_type = other DNA
cgactcgcaaccttttcggggtcccgagtccaacacccgtgggaatcccatgggcaccatggcccctcgctccaaaaatgctttcgcgtcgcgcagacactgctcggtagtttcggggatcagcgtttgagtaagagcccgcgtctgaaccctccgcgccgccccggccccagtggaaagacgcgcaggcaaaacgcaccacgtgacggagcgtgaccgcgcgccgagcgcgcgccaaggtcgggcaggaagagggcctatttcccatgattccttcatatttgcatatacgatacaaggctgttagagagataattagaattaatttgactgtaaacacaaagatattagtacaaaatacgtgacgtagaaagtaataatttcttgggtagtttgcagttttaaaattatgttttaaaatggactatcatatgcttaccgtaacttgaaagtatttcgatttcttggctttatatatcttgtggaaaggacgaaacaccaatgatagggacttagggtgatagaagtgcaaagcatgactgtcaaatttttggagcaggttttctgacttcggtcggaaaaccccttgtagttcctgcaatttaattttcgtttaaaactttattttattctttaacttaaaaaaaatatata

SEQ ID NO: 557 - DNA, 533 bp, synthetic construct; identical to SEQ ID NO: 365
  source 1..533: mol_type = other DNA

SEQ ID NO: 558 - DNA, 559 bp, synthetic construct; identical to SEQ ID NO: 366
  source 1..559: mol_type = other DNA

SEQ ID NO: 559 - DNA, 539 bp, synthetic construct; identical to SEQ ID NO: 367
  source 1..539: mol_type = other DNA

SEQ ID NO: 560 - DNA, 533 bp, synthetic construct; identical to SEQ ID NO: 368
  source 1..533: mol_type = other DNA

SEQ ID NO: 561 - DNA, 1087 bp, synthetic construct
  source 1..1087: mol_type = other DNA
caaagccggttatgaagcgggggtggggtgggctagttttaataggtccaggcgattagtacctggcatccttaaccacctacagtttgagaagggagtgggtgataaaagcctggaagggaagggaaatcgggccgggcattaggctccatcgctcatcaatagacaaggcctttaggaaactgcgacaacggcttttgctctgggcctttactgccgaatccaggtctccgggcttaacaacaacgaaggggctgtgactggctgctttctcaaccaatcagcaccgaactcatttgcatgggctgagaacaaatgttcgcgaactctagaaatgaatgacttaagtaagttccttagaatattatttttcctactgaaagttaccacatgcgtcgttgtttatacagtaataggaacaagaaaaaagtcacctaagctcaccctcatcaattgtggagttcctttatatcccatcttctctccaaacacatacgcagaatgatagggacttagggtgatagaagtgcaaagcatgactgtcaaatttttggagcaggttttctgacttcggtcggaaaacccctactttctggagtttcaaaaacagactgtacgccaagggtcatatctttttttgtattggtttgtgtcttggttggtgtcttaggtgttaatcctacagtggagggtttatgggaataggaagtaacatgtcgcctgcatgtcataggagaaaaagcgagcatcagccgtatcggctttgtaacacaaattagctatcgtgaagtccgctcagctcttccctttctaccctggctgctttttgcagggattggtccgtggtctccagtctcttgggttctcaccctgtgtgaaaatcttcgtgtttttccctaccccccagtcacctcttacacagcctctgcttccaagcgcagcccccacaggagtttgtaggatttctgtgctagcggggaatgtgttctcacctcatagagccaggtagaaattatgcagatgggcagttctctgggaagaaagcagggcctttggggctctcagtgtccccgttgggttgtagaca

SEQ ID NO: 562 - DNA, 1087 bp, synthetic construct
  source 1..1087: mol_type = other DNA
caaagccggttatgaagcgggggtggggtgggctagttttaataggtccaggcgattagtacctggcatccttaaccacctacagtttgagaagggagtgggtgataaaagcctggaagggaagggaaatcgggccgggcattaggctccatcgctcatcaatagacaaggcctttaggaaactgcgacaacggcttttgctctgggcctttactgccgaatccaggtctccgggcttaacaacaacgaaggggctgtgactggctgctttctcaaccaatcagcaccgaactcatttgcatgggctgagaacaaatgttcgcgaactctagaaatgaatgacttaagtaagttccttagaatattatttttcctactgaaagttaccacatgcgtcgttgtttatacagtaataggaacaagaaaaaagtcacctaagctcaccctcatcaattgtggagttcctttatatcccatcttctctccaaacacatacgcagaatgatagggacttagggtgatagaagtgcaaagcatgactgtcaaatttttggagcaggttttctgacttcggtcggaaaacccctactttctggagtttctaaaagtagactgtacgctaagggtcatatctttttttgttttggtttgtgtcttggttggcgtcttaaatgttaatcctacagtggagggctggcgaataggaagtaacatgtcgcctgcacgccataggagaaaaagcgagcatcagccgtatcggctttgtaacacaaattagctatcgtgaagtccgctcagctcttccctttctaccctggctgctttttgcagggattggtccgtggtctccagtctcttgggttctcaccctgtgtgaaaatcttcctgtttttccctaccccccaagtcacctcttacacagcctctgcttccaagcgcagcccccacaggagtttgtaggatttctgtgctagcggggagtgtgttctcacctcatagagccaggtagaaactacgcagatgggtgctgttctccaggaagaaagcagggcctttggggctctcagtgtccccgttgggttgtaga

SEQ ID NO: 563 - DNA, 1087 bp, synthetic construct
  source 1..1087: mol_type = other DNA
caaagccggttatgaagcgggggtggggtgggctagttttaataggtccaggcgattagtacctggcatccttaaccacctacagtttgagaagggagtgggtgataaaagcctggaagggaagggaaatcgggccgggcattaggctccatcgctcatcaatagacaaggcctttaggaaactgcgacaacggcttttgctctgggcctttactgccgaatccaggtctccgggcttaacaacaacgaaggggctgtgactggctgctttctcaaccaatcagcaccgaactcatttgcatgggctgagaacaaatgttcgcgaactctagaaatgaatgacttaagtaagttccttagaatattatttttcctactgaaagttaccacatgcgtcgttgtttatacagtaataggaacaagaaaaaagtcacctaagctcaccctcatcaattgtggagttcctttatatcccatcttctctccaaacacatacgcagaatgatagggacttagggtgatagaagtgcaaagcatgactgtcaaatttttggagcaggttttctgacttcggtcggaaaacccctactttctggagtttcaaaaacagaccgtacgccaagggtcatgtcttttttcgtattggtttgtgtcttagttgttaatcctacagtggaggcctggggaataagaagtaacatgtggcctgcacgccataggagaaaaagcgagcatcagccgtatcggctttgtaacacaaattagctatcgtgaagtccgctcagctcttccatttctaccctggctgctttttgcagggattggtccgtggtctccagtctcttgggttctcaccctgtgtgaaaatcttcgtgtttttccctaccccccaagtcacctcttacacagcctctgcttccaagcgcagcccccacaggagtttgtaggatttctgtgctagcggggagtgtgttctcacctcatagagccaggtagaaattatgcagatgggcgctgttctctgggaagaaagcagggcctttggggctctcagtgtccccgttgggttgtagacataacactctta

SEQ ID NO: 564 - DNA, 891 bp, synthetic construct
  source 1..891: mol_type = other DNA
caaagccggttatgaagcgggggtggggtgggctagttttaataggtccaggcgattagtacctggcatccttaaccacctacagtttgagaagggagtgggtgataaaagcctggaagggaagggaaatcgggccgggcattaggctccatcgctcatcaatagacaaggcctttaggaaactgcgacaacggcttttgctctgggcctttactgccgaatccaggtctccgggcttaacaacaacgaaggggctgtgactggctgctttctcaaccaatcagcaccgaactcatttgcatgggctgagaacaaatgttcgcgaactctagaaatgaatgacttaagtaagttccttagaatattatttttcctactgaaagttaccacatgcgtcgttgtttatacagtaataggaacaagaaaaaagtcacctaagctcaccctcatcaattgtggagttcctttatatcccatcttctctccaaacacatacgcagaatgatagggacttagggtgatagaagtgcaaagcatgactgtcaaatttttggagcaggttttctgacttcggtcggaaaacccctcctccggggatacaacgtgtttcctaaaagtagagggaggtaagagacggtagcacctgcggggcggcttgcacgccgagtgcctgtgacgcgccggcttaacttaactgcttccctgaagtaccttgaggttcctgatgtgcgggcggtagacggtaggcttatgcggcacgctgtcgtttccaccgtggctactgcgctttgggaaggccacgacctcctcctttggggaggtccttaggatctcagcttggcagtcgagtgggtggcgaccttttaaaggaatgggacccacccggagttc

SEQ ID NO: 565 - DNA, 1079 bp, synthetic construct
  source 1..1079: mol_type = other DNA
caaagccggttatgaagcgggggtggggtgggctagttttaataggtccaggcgattagtacctggcatccttaaccacctacagtttgagaagggagtgggtgataaaagcctggaagggaagggaaatcgggccgggcattaggctccatcgctcatcaatagacaaggcctttaggaaactgcgacaacggcttttgctctgggcctttactgccgaatccaggtctccgggcttaacaacaacgaaggggctgtgactggctgctttctcaaccaatcagcaccgaactcatttgcatgggctgagaacaaatgttcgcgaactctagaaatgaatgacttaagtaagttccttagaatattatttttcctactgaaagttaccacatgcgtcgttgtttatacagtaataggaacaagaaaaaagtcacctaagctcaccctcatcaattgtggagttcctttatatcccatcttctctccaaacacatacgcagaatgatagggacttagggtgatagaagtgcaaagcatgactgtcaaatttttggagcaggttttctgacttcggtcggaaaacccctttcccttcttgtaatacaaaataataacaaccacagaggacatcgcaagtaaaatgtgtataacaaccccatctaaagaaccctatcatctttctactatctgtctacctaaatatgtatagtataaataaccctatatagcactctaagcaacttaagttaggtaacttagaaaactcttttttttttttgagactgagtctcactctgtcgcacccaggctggagtgcagtggcgtgatctcggctcactgcaacctccaccttctgggttcaagtgattctcccatctcagtctcccaagtagctgggattacaggcacgccaccatgccctgctacatttttttttttttagtagagatgaggtttcaccacattggccaggctgttctcgaactcctgacctcaggtgatccgcccaccttggcctcatgaagtgctgggattacaggtgtgagccactgtacccagccagaaaactcttaaaaaac

SEQ ID NO: 566 - DNA, 969 bp, synthetic construct
  source 1..969: mol_type = other DNA
caaagccggttatgaagcgggggtggggtgggctagttttaataggtccaggcgattagtacctggcatccttaaccacctacagtttgagaagggagtgggtgataaaagcctggaagggaagggaaatcgggccgggcattaggctccatcgctcatcaatagacaaggcctttaggaaactgcgacaacggcttttgctctgggcctttactgccgaatccaggtctccgggcttaacaacaacgaaggggctgtgactggctgctttctcaaccaatcagcaccgaactcatttgcatgggctgagaacaaatgttcgcgaactctagaaatgaatgacttaagtaagttccttagaatattatttttcctactgaaagttaccacatgcgtcgttgtttatacagtaataggaacaagaaaaaagtcacctaagctcaccctcatcaattgtggagttcctttatatcccatcttctctccaaacacatacgcagaatgatagggacttagggtgatagaagtgcaaagcatgactgtcaaatttttggagcaggttttctgacttcggtcggaaaacccctctgaattttcttgcagttgaacaacagaggctttttttgtgtgtgtgggggtgcttggttttgggaggttgaagagtacttgttcgcaaactctctaaatgagagatggggaagtgtcttaccagctgattcgcgagagcacctgcaagtttacctgttttagtgatttgcgtttatgaaagttggagttgctgattttgtgatctctacttttaaggtaaaagcagggcggtgttgacttttcttgccagttggctgtcctgttttctttctcgcactgttttctttttgagacgaagtctgtcgctcaggctggagtgcactggcgtgatctcggctcgctgcaaactttgccgaacccctgtttagcgatttccgtttg

SEQ ID NO: 567 - DNA, 1087 bp, synthetic construct
  source 1..1087: mol_type = other DNA
caaagccggttatgaagcgggggtggggtgggctagttttaataggtccaggcgattagtacctggcatccttaaccacctacagtttgagaagggagtgggtgataaaagcctggaagggaagggaaatcgggccgggcattaggctccatcgctcatcaatagacaaggcctttaggaaactgcgacaacggcttttgctctgggcctttactgccgaatccaggtctccgggcttaacaacaacgaaggggctgtgactggctgctttctcaaccaatcagcaccgaactcatttgcatgggctgagaacaaatgttcgcgaactctagaaatgaatgacttaagtaagttccttagaatattatttttcctactgaaagttaccacatgcgtcgttgtttatacagtaataggaacaagaaaaaagtcacctaagctcaccctcatcaattgtggagttcctttatatcccatcttctctccaaacacatacgcagaatgatagggacttagggtgatagaagtgcaaagcatgactgtcaaatttttggagcaggttttctgacttcggtcggaaaacccctatatgtggtaatccaacaatagaaattatttttaagtttgtgtgttcctttttctgttcaatggtgcttttgatattgttgtaaagcagtgactagcagattctgtgtggtaaaagcactgaaccctgtttagttcttttctccctaccttattggtaattatttctgtgtatatatgttccaaagaaatgcggcttgtatattcatgcttttcaactttttgtgatagacagttgatacacaagtagtacctcctccgggatcttcttagtcaagactgtttggtagatgcatgttttttgttacttgtaatgtacagtattcagttcattttctttttgcagcactgtccggttgaaacacaacgcgaggatcgggcgtggtggctcacgcctgtaatcccagcactttgggaggccgaggcaggacaatcaagaccaatcctggtcatcaaggcaggagaatcaagaccatcgaggtcaggagatcaagaccatcct

SEQ ID NO: 568 - DNA, 1085 bp, synthetic construct
  source 1..1085: mol_type = other DNA
caaagccggttatgaagcgggggtggggtgggctagttttaataggtccaggcgattagtacctggcatccttaaccacctacagtttgagaagggagtgggtgataaaagcctggaagggaagggaaatcgggccgggcattaggctccatcgctcatcaatagacaaggcctttaggaaactgcgacaacggcttttgctctgggcctttactgccgaatccaggtctccgggcttaacaacaacgaaggggctgtgactggctgctttctcaaccaatcagcaccgaactcatttgcatgggctgagaacaaatgttcgcgaactctagaaatgaatgacttaagtaagttccttagaatattatttttcctactgaaagttaccacatgcgtcgttgtttatacagtaataggaacaagaaaaaagtcacctaagctcaccctcatcaattgtggagttcctttatatcccatcttctctccaaacacatacgcagaatgatagggacttagggtgatagaagtgcaaagcatgactgtcaaatttttggagcaggttttctgacttcggtcggaaaacccctacatcaggttgtttttctgtttttacatcaggttgtttttctgtttggttttttttttacaccacgtttatacgccggtgcacggtttaccactgaaaacacctttcatctacaggtgatatcttttaacacaaataaaatgtagtagtcctaggagacggaatagaaggaggtggggcctaggcagattcatctctgcggtgcattttgcctctggccctcgggccctagtttgcgatctttcccatcttgcctctgcttccctctgcacaatcctgagtattgcagtaccttacacttaaggaaatttcgtcttgccaaagttgatccatttcagctccgaaacataacaggaactagtgcaacgataaacgtatgaggaacttgcaataagagtgacagaatcctttgaatcaaaaaaaaaaaaagccaccacttaatgagtatctaccatatgtcaagggcttcaccaatatttcattgaaatattccagacca

SEQ ID NO: 569 - DNA, 1087 bp, synthetic construct
  source 1..1087: mol_type = other DNA
caaagccggttatgaagcgggggtggggtgggctagttttaataggtccaggcgattagtacctggcatccttaaccacctacagtttgagaagggagtgggtgataaaagcctggaagggaagggaaatcgggccgggcattaggctccatcgctcatcaatagacaaggcctttaggaaactgcgacaacggcttttgctctgggcctttactgccgaatccaggtctccgggcttaacaacaacgaaggggctgtgactggctgctttctcaaccaatcagcaccgaactcatttgcatgggctgagaacaaatgttcgcgaactctagaaatgaatgacttaagtaagttccttagaatattatttttcctactgaaagttaccacatgcgtcgttgtttatacagtaataggaacaagaaaaaagtcacctaagctcaccctcatcaattgtggagttcctttatatcccatcttctctccaaacacatacgcagaatgatagggacttagggtgatagaagtgcaaagcatgactgtcaaatttttggagcaggttttctgacttcggtcggaaaacccctcttatgatgtttgttgccaatgatagattgttttcactgtgcaaaaattatgggtagttttggtggtcttgatgcagttgtaagcttggggtatgaaggtttgggccacgcctgggcgcttccggctgcgccggatgctgtttcctttccgctcccaggggcgttgggaacggttgtaggacgtggctctttattcgtgagttttccatttacctccgctgaacctagagcttcagacgccctatggcgtccgcctcgacccaaccggcggccttgagcgctgagcaagcaaagggtgagaatcgtcctagtcaaggcataggctgctggcctggggtagtcaaggcatgggctgctggtctggggaggatgcgggcggaggatgtggggcgacaaacctggctacgtccgccgggaaaatggggtaggggacgccgggtaccgtccttctaagtggggcgcttgcccccaagacttgggatcttattgggttacctaca

SEQ ID NO: 570 - DNA, 1085 bp, synthetic construct
  source 1..1085: mol_type = other DNA
caaagccggttatgaagcgggggtggggtgggctagttttaataggtccaggcgattagtacctggcatccttaaccacctacagtttgagaagggagtgggtgataaaagcctggaagggaagggaaatcgggccgggcattaggctccatcgctcatcaatagacaaggcctttaggaaactgcgacaacggcttttgctctgggcctttactgccgaatccaggtctccgggcttaacaacaacgaaggggctgtgactggctgctttctcaaccaatcagcaccgaactcatttgcatgggctgagaacaaatgttcgcgaactctagaaatgaatgacttaagtaagttccttagaatattatttttcctactgaaagttaccacatgcgtcgttgtttatacagtaataggaacaagaaaaaagtcacctaagctcaccctcatcaattgtggagttcctttatatcccatcttctctccaaacacatacgcagaatgatagggacttagggtgatagaagtgcaaagcatgactgtcaaatttttggagcaggttttctgacttcggtcggaaaaccccttctttactgttatatgttaggcgaaatattacgcgtttggagtaagtggtgctttttgtaactgaaaagagattctgtgtgtgtttttttttttttagaggctgcatagttatttgtatgaaccgcaggtgacctaattagcaaggtaattcagacctgtatcctagcacttaagaagtggaagtgggataaccctgcgtgttctcgtgtgggaggctagcttaagcaacaaagcaggaaggccccaccaacaaaagaatttaaaaattatacgtgcgtggtggcgcgcgtatgaggaaattatttggcaactgtgttacagtatagcagcaaatggaatagacctagtccctgactttaggagacctgcctcagccccccgaatggctgggactacaggcgtgcgcctccgcgcccagctaatttttgcatttttggtagagacgggttcaccatgttggccaggatggtctccatctcttcatctggtgatccgcc

SEQ ID NO: 571 - DNA, 1087 bp, synthetic construct
  source 1..1087: mol_type = other DNA
caaagccggttatgaagcgggggtggggtgggctagttttaataggtccaggcgattagtacctggcatccttaaccacctacagtttgagaagggagtgggtgataaaagcctggaagggaagggaaatcgggccgggcattaggctccatcgctcatcaatagacaaggcctttaggaaactgcgacaacggcttttgctctgggcctttactgccgaatccaggtctccgggcttaacaacaacgaaggggctgtgactggctgctttctcaaccaatcagcaccgaactcatttgcatgggctgagaacaaatgttcgcgaactctagaaatgaatgacttaagtaagttccttagaatattatttttcctactgaaagttaccacatgcgtcgttgtttatacagtaataggaacaagaaaaaagtcacctaagctcaccctcatcaattgtggagttcctttatatcccatcttctctccaaacacatacgcagaatgatagggacttagggtgatagaagtgcaaagcatgactgtcaaatttttggagcaggttttctgacttcggtcggaaaacccctaccttattcacgcctaaaaagtagactgactgtggggtggtcgtgttttttgtttcttgttggtaggtggtgaatgcgtttttttcgttgttttctccgttactcaggctgccagttgcttggcagtcttgtcgctggctgtggacgctctgcacttcatcaccgtccccagctgcgctttgagccggtctaaggttgcccacagtattgacgttgggacccacgaaactggcaatttccatgtgtgcggccttacccagttctcccaaacttctgcgtataaccgcttctctgtgcttcagaaagataagtccggccccggcctcacacagcagctcagttcgtgacagcgtttaatatgtaaaatggagcaaataatttatagggcgttgggagagttaaagagactaattcatttacgtgttaaatacagggaatggcttttgcattgatataaccccagcctccagcatgcgccagacctgacgtaggtgttcggc

SEQ ID NO: 572 - DNA, 1087 bp, synthetic construct
  source 1..1087: mol_type = other DNA
caaagccggttatgaagcgggggtggggtgggctagttttaataggtccaggcgattagtacctggcatccttaaccacctacagtttgagaagggagtgggtgataaaagcctggaagggaagggaaatcgggccgggcattaggctccatcgctcatcaatagacaaggcctttaggaaactgcgacaacggcttttgctctgggcctttactgccgaatccaggtctccgggcttaacaacaacgaaggggctgtgactggctgctttctcaaccaatcagcaccgaactcatttgcatgggctgagaacaaatgttcgcgaactctagaaatgaatgacttaagtaagttccttagaatattatttttcctactgaaagttaccacatgcgtcgttgtttatacagtaataggaacaagaaaaaagtcacctaagctcaccctcatcaattgtggagttcctttatatcccatcttctctccaaacacatacgcagaatgatagggacttagggtgatagaagtgcaaagcatgactgtcaaatttttggagcaggttttctgacttcggtcggaaaaccccttttgacccattacccatctaagttagatgcttttttaaatgttttttaatttttaaatttttaatttttttcattatttattttttatttttgagacggatctcggctcactgtaacctccacctcccgggttcaagcgattctcctgactcagcctcccgagtagctgggattacaggcgcgcgccaccatgcccggctaatttttctatttttagtaaagacggggtttcgccatgttgaccagggtggtcttgaactcctgacgtcaggtgatcctcctgcctcgtgctgggattgcaggcgtgagccaccgctcccggcccttagatgctttttaatcagcaagtacgcaatgctttcctgacaggaatgtcaagtccgtcaggaaatccacataagggtgttaagcaggcaaagtaccacatacagattaaaatcaaaagcactgtcaacgcttatttaatttatacagtagaccctaacttttctaattttgtg

SEQ ID NO: 573 - DNA, 1087 bp, synthetic construct
  source 1..1087: mol_type = other DNA
caaagccggttatgaagcgggggtggggtgggctagttttaataggtccaggcgattagtacctggcatccttaaccacctacagtttgagaagggagtgggtgataaaagcctggaagggaagggaaatcgggccgggcattaggctccatcgctcatcaatagacaaggcctttaggaaactgcgacaacggcttttgctctgggcctttactgccgaatccaggtctccgggcttaacaacaacgaaggggctgtgactggctgctttctcaaccaatcagcaccgaactcatttgcatgggctgagaacaaatgttcgcgaactctagaaatgaatgacttaagtaagttccttagaatattatttttcctactgaaagttaccacatgcgtcgttgtttatacagtaataggaacaagaaaaaagtcacctaagctcaccctcatcaattgtggagttcctttatatcccatcttctctccaaacacatacgcagaatgatagggacttagggtgatagaagtgcaaagcatgactgtcaaatttttggagcaggttttctgacttcggtcggaaaacccctgtttacttggttttaaaaatagcttgcactagcgataccgcgaatatggttattaggtttgttaggcacagtcgtgtcttactatagaaaaataacgtagtgttcattttgctgcctgtatgtgttaatttgtccttattgcgccattgttcttgttaagtcttctgtaaggagttgcgggtttcaaactgtcagtctgagagcataagctcacttttcagtcagttgaattgaatgttacattcgattggttctggatattgatattacccaaggcttgtcctgtttgtaagtcttttcctacacctgacaatatgattatgtttacaatgtccctagaactctgggtgtatcgttcccactgaataaaatttgatctctaagttgacctataaatttaagtaccaaaaaactggtttgtaagattttggaaggcagaggcagggaagagaccaacgtggtctacatataaagtaccaggtacatataaagtaccaggt

SEQ ID NO: 574 - DNA, 1083 bp, synthetic construct
  source 1..1083: mol_type = other DNA
caaagccggttatgaagcgggggtggggtgggctagttttaataggtccaggcgattagtacctggcatccttaaccacctacagtttgagaagggagtgggtgataaaagcctggaagggaagggaaatcgggccgggcattaggctccatcgctcatcaatagacaaggcctttaggaaactgcgacaacggcttttgctctgggcctttactgccgaatccaggtctccgggcttaacaacaacgaaggggctgtgactggctgctttctcaaccaatcagcaccgaactcatttgcatgggctgagaacaaatgttcgcgaactctagaaatgaatgacttaagtaagttccttagaatattatttttcctactgaaagttaccacatgcgtcgttgtttatacagtaataggaacaagaaaaaagtcacctaagctcaccctcatcaattgtggagttcctttatatcccatcttctctccaaacacatacgcagaatgatagggacttagggtgatagaagtgcaaagcatgactgtcaaatttttggagcaggttttctgacttcggtcggaaaacccctatttttgtggtgctaaaagttagattgcattccgcccttctcacgtctctttacgtgttgtttgcgaggcgtggcctcggaggtaaatggtctccttttacctcagataagcttacctttgctctgtgagtaagaatgtagctacacttccaaatttagctattgtcctttgcggtccaaatgaaaatattaccttccgatctaacaatgttaaactagtcccaggcccttctatcgattgccagaatagactagactactacacagacacaccctctcaaatcaggccagctcctgcaacctgcacctacagtttgtcccctgggacaaatgaaaggacaggccctctttcccccccccccccaaatcagagcacacacagatcttggggtctggggcagaaatttcgttcatggaaaaaacaaacaaacaaacaaacacgatcaaaggaagctcgttccctttggcctcagggtttcttagacgccgtgttccc

SEQ ID NO: 575 - DNA, 1084 bp, synthetic construct
  source 1..1084: mol_type = other DNA
caaagccggttatgaagcgggggtggggtgggctagttttaataggtccaggcgattagtacctggcatccttaaccacctacagtttgagaagggagtgggtgataaaagcctggaagggaagggaaatcgggccgggcattaggctccatcgctcatcaatagacaaggcctttaggaaactgcgacaacggcttttgctctgggcctttactgccgaatccaggtctccgggcttaacaacaacgaaggggctgtgactggctgctttctcaaccaatcagcaccgaactcatttgcatgggctgagaacaaatgttcgcgaactctagaaatgaatgacttaagtaagttccttagaatattatttttcctactgaaagttaccacatgcgtcgttgtttatacagtaataggaacaagaaaaaagtcacctaagctcaccctcatcaattgtggagttcctttatatcccatcttctctccaaacacatacgcagaatgatagggacttagggtgatagaagtgcaaagcatgactgtcaaatttttggagcaggttttctgacttcggtcggaaaacccctataactggtaaccaaaagcagattactttcccccttgtggtcttcgcgtttgcggacgggagagaactttcggccattttccttttagaaatttaacttcttgaaggccaccaggtgacccttacttccctctcacctttccttctacctgtactttctctattaaaaagcctgcagaagtacccttgacaaattgccaaaaatgacacctaaaaaaaaaaaaaggaaaaacgacaccttaggtaattataggttgtaagaaaaagatttgacctcttggagtttttatttcttaataccaaaggacacccaaggaacgtatctctcaaaattgggtttcaaacctcagccgtttccttcttagttccagtgcttaacacgcaacagacctgcacaccactacactgcatacgagttttaaagttaataaatcagtcacccctccatagtcttctacctacttgaagacagaaacggctgctaggaagcaattcttc

SEQ ID NO: 576 - DNA, 1087 bp, synthetic construct
  source 1..1087: mol_type = other DNA
caaagccggttatgaagcgggggtggggtgggctagttttaataggtccaggcgattagtacctggcatccttaaccacctacagtttgagaagggagtgggtgataaaagcctggaagggaagggaaatcgggccgggcattaggctccatcgctcatcaatagacaaggcctttaggaaactgcgacaacggcttttgctctgggcctttactgccgaatccaggtctccgggcttaacaacaacgaaggggctgtgactggctgctttctcaaccaatcagcaccgaactcatttgcatgggctgagaacaaatgttcgcgaactctagaaatgaatgacttaagtaagttccttagaatattatttttcctactgaaagttaccacatgcgtcgttgtttatacagtaataggaacaagaaaaaagtcacctaagctcaccctcatcaattgtggagttcctttatatcccatcttctctccaaacacatacgcagaatgatagggacttagggtgatagaagtgcaaagcatgactgtcaaatttttggagcaggttttctgacttcggtcggaaaacccctctggggaataagagtggtttaaagaaagaacaatttgagagatctgcttagatctaataaaacccaagtatagtttctttagacgtcttatatctcacgtaggacctcttatttcagactcactgcaagaacaagctaaagaactatatacagtcaggaacaaggtgagccatcgcggttctcagtcccatgatcttaagagtttttcctcttcccctcttccctggctgtcctggagctcactctgtagaccaggctggtctcaaactcagaaatccacttacctctgcctcccaagggctgggattaaaggcatgcaccaccattgcccggcagggtatgtggactatgctgtccttcaactcagagatcgtggtactttaaatctcattttccgaaagaaaagaaaagaaaggaaggggggaaataaagccagtatattttgcacccacaatctgaagttctacaaatattgttagaaaatgcaaaggacccaagtc

SEQ ID NO: 577 - DNA, 1087 bp, synthetic construct
  source 1..1087: mol_type = other DNA
caaagccggttatgaagcgggggtggggtgggctagttttaataggtccaggcgattagtacctggcatccttaaccacctacagtttgagaagggagtgggtgataaaagcctggaagggaagggaaatcgggccgggcattaggctccatcgctcatcaatagacaaggcctttaggaaactgcgacaacggcttttgctctgggcctttactgccgaatccaggtctccgggcttaacaacaacgaaggggctgtgactggctgctttctcaaccaatcagcaccgaactcatttgcatgggctgagaacaaatgttcgcgaactctagaaatgaatgacttaagtaagttccttagaatattatttttcctactgaaagttaccacatgcgtcgttgtttatacagtaataggaacaagaaaaaagtcacctaagctcaccctcatcaattgtggagttcctttatatcccatcttctctccaaacacatacgcagaatgatagggacttagggtgatagaagtgcaaagcatgactgtcaaatttttggagcaggttttctgacttcggtcggaaaacccctctcggtttatcttaaagggttttaaatatagaaagcttccttagtcttatgggtgagagtgctgtttaagccttacctaggtatgtctttgaacatttattacagattgttatttgtgactatgaccactcaggtgttctgttcttgtgaatttagacacactcagaaaggctacacactcaaagaccacaccaaagtgaagtactatctgggccgtgaaactggtcacatatcagttattttgcagtaaaacaaggaagtcaatcatactgcttcagtgggtcagggagtcaagaatgcacagtacaagagctggtgagattcctcagcaggtaagagcactgaatgctcttccaaagattctgagttcaaatcccagcaaccacgtggtggatttgaacaaaggatgaaaacaaccatccataaccagatctgatgccctcttctggagtgtcaaaagacagctatggtgtacttacataaataaataagtaaaaaca

SEQ ID NO: 578 - DNA, 1087 bp, synthetic construct
  source 1..1087: mol_type = other DNA
caaagccggttatgaagcgggggtggggtgggctagttttaataggtccaggcgattagtacctggcatccttaaccacctacagtttgagaagggagtgggtgataaaagcctggaagggaagggaaatcgggccgggcattaggctccatcgctcatcaatagacaaggcctttaggaaactgcgacaacggcttttgctctgggcctttactgccgaatccaggtctccgggcttaacaacaacgaaggggctgtgactggctgctttctcaaccaatcagcaccgaactcatttgcatgggctgagaacaaatgttcgcgaactctagaaatgaatgacttaagtaagttccttagaatattatttttcctactgaaagttaccacatgcgtcgttgtttatacagtaataggaacaagaaaaaagtcacctaagctcaccctcatcaattgtggagttcctttatatcccatcttctctccaaacacatacgcagaatgatagggacttagggtgatagaagtgcaaagcatgactgtcaaatttttggagcaggttttctgacttcggtcggaaaacccctccacattttgtgtttaaaaatagaaatatttaagtgagatcagtttaaatctgctttatctagggtgtctaactgcttgcatctttttaacttttccttatttgtgagaaggtctgtaaaacttattatatgttagtacactgtagctgtcttcagacactccagaagagggattcagatcaccttacagatggttttgagccaccatgtggttgctgggatttgaactcaggacctttagaaaagtagttgggtgctcttacccgctgagccatctcaccagccctttttttttcttttttccagttcgggtttctctgtgtgtagccctggctgtcctggaactcattctgtagaccgggctggcctcgaactcagaaatctgcctgcctctgcctcccaagtgctgggattaaaggaatgtgccttcattgcccggctctagggctttttgttgttgtttgtttgtttgtttgtttgtttgcttttgtggatggcct

SEQ ID NO: 579 - DNA, 1087 bp, synthetic construct
  source 1..1087: mol_type = other DNA
caaagccggttatgaagcgggggtggggtgggctagttttaataggtccaggcgattagtacctggcatccttaaccacctacagtttgagaagggagtgggtgataaaagcctggaagggaagggaaatcgggccgggcattaggctccatcgctcatcaatagacaaggcctttaggaaactgcgacaacggcttttgctctgggcctttactgccgaatccaggtctccgggcttaacaacaacgaaggggctgtgactggctgctttctcaaccaatcagcaccgaactcatttgcatgggctgagaacaaatgttcgcgaactctagaaatgaatgacttaagtaagttccttagaatattatttttcctactgaaagttaccacatgcgtcgttgtttatacagtaataggaacaagaaaaaagtcacctaagctcaccctcatcaattgtggagttcctttatatcccatcttctctccaaacacatacgcagaatgatagggacttagggtgatagaagtgcaaagcatgactgtcaaatttttggagcaggttttctgacttcggtcggaaaacccctaaaaccagtaagggagaaaggtcaagtaacatataaaggaaggcctatcagaattacaccagacttttcaccagagactatgaaagccagaagagcctggacagatgttatacagacactaagagaacacaaatgccagcccaggctactatacctggccaaactctcaattaccatagatggagaaaccaaagtattccacgacaaaaacaaattcacacaatatctttccacgaatccagcccttcaaaggataatgacagaaaagaagcaatacaaggacggaaatcacgccctagaacaaccaagaaactaatcattcaacaaaccaaaaagaagacagccacaagaacagaatgccaactctaacaacaaaaataaaaggaagcaacaattacttttccttaatatctcttaatatcaatggactcaattccccaataaaaagacatagactaacagactggctacacaaacaggacccaacattctgctgctta

SEQ ID NO: 580 - DNA, 1087 bp, synthetic construct
  source 1..1087: mol_type = other DNA
caaagccggttatgaagcgggggtggggtgggctagttttaataggtccaggcgattagtacctggcatccttaaccacctacagtttgagaagggagtgggtgataaaagcctggaagggaagggaaatcgggccgggcattaggctccatcgctcatcaatagacaaggcctttaggaaactgcgacaacggcttttgctctgggcctttactgccgaatccaggtctccgggcttaacaacaacgaaggggctgtgactggctgctttctcaaccaatcagcaccgaactcatttgcatgggctgagaacaaatgttcgcgaactctagaaatgaatgacttaagtaagttccttagaatattatttttcctactgaaagttaccacatgcgtcgttgtttatacagtaataggaacaagaaaaaagtcacctaagctcaccctcatcaattgtggagttcctttatatcccatcttctctccaaacacatacgcagaatgatagggacttagggtgatagaagtgcaaagcatgactgtcaaatttttggagcaggttttctgacttcggtcggaaaacccctcccaatttcactggtctacaatgaaagcaaaacagttctcttccccgctccccggtgtgtgagaggggctttgatccttctctggtttcctaggaaacgcgtatgtgctagagccacgctctgagacttccgcctcgtgcggtcccgcttcctttctgcctcctctggcctgcatccgtgggggaggtggctggctgcagggttctccggatctcttctgtgttcccactactcaagcaccgagtggcgttctatggcgtccgcctcggctcagcccgcggccctgagcgcggagcaggccaagggtgaggaaagagcctagtctgggtgtgggccgtcttctggggggagggcgcgatactattctttgcctctccaagtggggcccttgcccattagggcgaagggttgggaggacaagcttatcgggttgcttgcaggcctcggcccactaattccctgcctcttccctcctctgggctcgcccgccgtcctccgcg

SEQ ID NO: 581 - DNA, 1087 bp, synthetic construct
  source 1..1087: mol_type = other DNA
caaagccggttatgaagcgggggtggggtgggctagttttaataggtccaggcgattagtacctggcatccttaaccacctacagtttgagaagggagtgggtgataaaagcctggaagggaagggaaatcgggccgggcattaggctccatcgctcatcaatagacaaggcctttaggaaactgcgacaacggcttttgctctgggcctttactgccgaatccaggtctccgggcttaacaacaacgaaggggctgtgactggctgctttctcaaccaatcagcaccgaactcatttgcatgggctgagaacaaatgttcgcgaactctagaaatgaatgacttaagtaagttccttagaatattatttttcctactgaaagttaccacatgcgtcgttgtttatacagtaataggaacaagaaaaaagtcacctaagctcaccctcatcaattgtggagttcctttatatcccatcttctctccaaacacatacgcagaatgatagggacttagggtgatagaagtgcaaagcatgactgtcaaatttttggagcaggttttctgacttcggtcggaaaacccctgaatttgttaaattacaggaggaagcttttttagttcattttacaaatactttcttgttaggtagataataccttctaaggttattatctggatcttctaagtctttttatcgctagcaagtctaagtttctggactttggaattagaagttaatgtcgtaggcgggcatggtggtccacgcctttaatcccagagtttgggaggcagacgcaggtggttttctgagttcgaggccatcctgctcttcaatgttagttccaggacagccagggttatacaaagaaaccctgtctcgagaaacaaaacaaacaaaaaaagagtagctgagtgctctgagttgtctctccagccccttagctatttattttcatttaaattatttttgttttattcgcttgtgtgcctgagtttgaatttcccgggattaacagttgaagactagggctggtgagatggctcagcggttaagattgccgactgctcttccaaaggtcctgag

SEQ ID NO: 582 - DNA, 1087 bp, synthetic construct
  source 1..1087: mol_type = other DNA
caaagccggttatgaagcgggggtggggtgggctagttttaataggtccaggcgattagtacctggcatccttaaccacctacagtttgagaagggagtgggtgataaaagcctggaagggaagggaaatcgggccgggcattaggctccatcgctcatcaatagacaaggcctttaggaaactgcgacaacggcttttgctctgggcctttactgccgaatccaggtctccgggcttaacaacaacgaaggggctgtgactggctgctttctcaaccaatcagcaccgaactcatttgcatgggctgagaacaaatgttcgcgaactctagaaatgaatgacttaagtaagttccttagaatattatttttcctactgaaagttaccacatgcgtcgttgtttatacagtaataggaacaagaaaaaagtcacctaagctcaccctcatcaattgtggagttcctttatatcccatcttctctccaaacacatacgcagaatgatagggacttagggtgatagaagtgcaaagcatgactgtcaaatttttggagcaggttttctgacttcggtcggaaaacccctaccccctaattctacaagaatagaaagcttagcagctcctctgaatggttgctctcaggtgctagtggttgcaagtcgtatgttgatgcctgcctttgccctacctggtgtgtgagcgtgagcgcgccccacctctccagcctctctcttactgtttttcagacaagatgggactgttgttctcctactgctatgtacctcaatttcaattgatcatgcctggacataactgcccatgttgtaaggtcgtctacgttgtaaggtcgtgctcagtttctgatgcctagactagtcacctttccgtttgcctcctgactgtgtaaatgaggcaaatgaaggtggtctcttaactgacatgttagtgtttgacctatgggatagtttctcattgttgagacagaatttctagaagctggtccgctgagcggctaagagcacttgctgatattgcaaaggatctacctgggtttggttctcagcactcacatggaagttcacat

SEQ ID NO: 583 - DNA, 654 bp, synthetic construct
  source 1..654: mol_type = other DNA
caaagccggttatgaagcgggggtggggtgggctagttttaataggtccaggcgattagtacctggcatccttaaccacctacagtttgagaagggagtgggtgataaaagcctggaagggaagggaaatcgggccgggcattaggctccatcgctcatcaatagacaaggcctttaggaaactgcgacaacggcttttgctctgggcctttactgccgaatccaggtctccgggcttaacaacaacgaaggggctgtgactggctgctttctcaaccaatcagcaccgaactcatttgcatgggctgagaacaaatgttcgcgaactctagaaatgaatgacttaagtaagttccttagaatattatttttcctactgaaagttaccacatgcgtcgttgtttatacagtaataggaacaagaaaaaagtcacctaagctcaccctcatcaattgtggagttcctttatatcccatcttctctccaaacacatacgcagaatgatagggacttagggtgatagaagtgcaaagcatgactgtcaaatttttggagcaggttttctgacttcggtcggaaaaccccttgtagttcctgcaatttaattttcgtttaaaactttattttattctttaacttaaaaaaaatatata

SEQ ID NO: 584 - DNA, 1087 bp, synthetic construct
  source 1..1087: mol_type = other DNA
cacgcctgcctgggctgctccaaggtggtggctaggggtggcacaagttacacattttcaatttggataggttgtgattcttgtcttccccagtcagatacctacagccgctgagagccggtattccaacgccatgagacgccttctgtcgtgagcagttgacaagaaagacccagcacttactgcaaccggaaggagcggttcctccctcgctcgcgcagccgctcttccccgccactccctcggtgcccgccagcacattcccagcaagccctgagtatatttgcatatcaactcactacatttttttcttctaactaaaaaatcgaaaggacaaattccagattctccttgtgaagtcttcctttcagttcagaagaaatggaattcgctcttcaacttcaggaagttgaaataaagagttgcttggattttgtgttcacctttaccaaaaaatggatttggtaacactgccaccctgctttggtgacagagaaagcaatgatagggacttagggtgatagaagtgcaaagcatgactgtcaaatttttggagcaggttttctgacttcggtcggaaaacccctactttctggagtttcaaaaacagactgtacgccaagggtcatatctttttttgtattggtttgtgtcttggttggtgtcttaggtgttaatcctacagtggagggtttatgggaataggaagtaacatgtcgcctgcatgtcataggagaaaaagcgagcatcagccgtatcggctttgtaacacaaattagctatcgtgaagtccgctcagctcttccctttctaccctggctgctttttgcagggattggtccgtggtctccagtctcttgggttctcaccctgtgtgaaaatcttcgtgtttttccctaccccccagtcacctcttacacagcctctgcttccaagcgcagcccccacaggagtttgtaggatttctgtgctagcggggaatgtgttctcacctcatagagccaggtagaaattatgcagatgggcagttctctgggaagaaagcagggcctttggggctctcagtgtccccgttgggttgtagaca

SEQ ID NO: 585 - DNA, 1087 bp, synthetic construct
  source 1..1087: mol_type = other DNA
cacgcctgcctgggctgctccaaggtggtggctaggggtggcacaagttacacattttcaatttggataggttgtgattcttgtcttccccagtcagatacctacagccgctgagagccggtattccaacgccatgagacgccttctgtcgtgagcagttgacaagaaagacccagcacttactgcaaccggaaggagcggttcctccctcgctcgcgcagccgctcttccccgccactccctcggtgcccgccagcacattcccagcaagccctgagtatatttgcatatcaactcactacatttttttcttctaactaaaaaatcgaaaggacaaattccagattctccttgtgaagtcttcctttcagttcagaagaaatggaattcgctcttcaacttcaggaagttgaaataaagagttgcttggattttgtgttcacctttaccaaaaaatggatttggtaacactgccaccctgctttggtgacagagaaagcaatgatagggacttagggtgatagaagtgcaaagcatgactgtcaaatttttggagcaggttttctgacttcggtcggaaaacccctactttctggagtttctaaaagtagactgtacgctaagggtcatatctttttttgttttggtttgtgtcttggttggcgtcttaaatgttaatcctacagtggagggctggcgaataggaagtaacatgtcgcctgcacgccataggagaaaaagcgagcatcagccgtatcggctttgtaacacaaattagctatcgtgaagtccgctcagctcttccctttctaccctggctgctttttgcagggattggtccgtggtctccagtctcttgggttctcaccctgtgtgaaaatcttcctgtttttccctaccccccaagtcacctcttacacagcctctgcttccaagcgcagcccccacaggagtttgtaggatttctgtgctagcggggagtgtgttctcacctcatagagccaggtagaaactacgcagatgggtgctgttctccaggaagaaagcagggcctttggggctctcagtgtccccgttgggttgtaga

SEQ ID NO: 586 - DNA, 1087 bp, synthetic construct
  source 1..1087: mol_type = other DNA
cacgcctgcctgggctgctccaaggtggtggctaggggtggcacaagttacacattttcaatttggataggttgtgattcttgtcttccccagtcagatacctacagccgctgagagccggtattccaacgccatgagacgccttctgtcgtgagcagttgacaagaaagacccagcacttactgcaaccggaaggagcggttcctccctcgctcgcgcagccgctcttccccgccactccctcggtgcccgccagcacattcccagcaagccctgagtatatttgcatatcaactcactacatttttttcttctaactaaaaaatcgaaaggacaaattccagattctccttgtgaagtcttcctttcagttcagaagaaatggaattcgctcttcaacttcaggaagttgaaataaagagttgcttggattttgtgttcacctttaccaaaaaatggatttggtaacactgccaccctgctttggtgacagagaaagcaatgatagggacttagggtgatagaagtgcaaagcatgactgtcaaatttttggagcaggttttctgacttcggtcggaaaacccctactttctggagtttcaaaaacagaccgtacgccaagggtcatgtcttttttcgtattggtttgtgtcttagttgttaatcctacagtggaggcctggggaataagaagtaacatgtggcctgcacgccataggagaaaaagcgagcatcagccgtatcggctttgtaacacaaattagctatcgtgaagtccgctcagctcttccatttctaccctggctgctttttgcagggattggtccgtggtctccagtctcttgggttctcaccctgtgtgaaaatcttcgtgtttttccctaccccccaagtcacctcttacacagcctctgcttccaagcgcagcccccacaggagtttgtaggatttctgtgctagcggggagtgtgttctcacctcatagagccaggtagaaattatgcagatgggcgctgttctctgggaagaaagcagggcctttggggctctcagtgtccccgttgggttgtagacataacactctta

SEQ ID NO: 587 - DNA, 891 bp, synthetic construct
  source 1..891: mol_type = other DNA
cacgcctgcctgggctgctccaaggtggtggctaggggtggcacaagttacacattttcaatttggataggttgtgattcttgtcttccccagtcagatacctacagccgctgagagccggtattccaacgccatgagacgccttctgtcgtgagcagttgacaagaaagacccagcacttactgcaaccggaaggagcggttcctccctcgctcgcgcagccgctcttccccgccactccctcggtgcccgccagcacattcccagcaagccctgagtatatttgcatatcaactcactacatttttttcttctaactaaaaaatcgaaaggacaaattccagattctccttgtgaagtcttcctttcagttcagaagaaatggaattcgctcttcaacttcaggaagttgaaataaagagttgcttggattttgtgttcacctttaccaaaaaatggatttggtaacactgccaccctgctttggtgacagagaaagcaatgatagggacttagggtgatagaagtgcaaagcatgactgtcaaatttttggagcaggttttctgacttcggtcggaaaacccctcctccggggatacaacgtgtttcctaaaagtagagggaggtaagagacggtagcacctgcggggcggcttgcacgccgagtgcctgtgacgcgccggcttaacttaactgcttccctgaagtaccttgaggttcctgatgtgcgggcggtagacggtaggcttatgcggcacgctgtcgtttccaccgtggctactgcgctttgggaaggccacgacctcctcctttggggaggtccttaggatctcagcttggcagtcgagtgggtggcgaccttttaaaggaatgggacccacccggagttc

SEQ ID NO: 588 - DNA, 1079 bp, synthetic construct
  source 1..1079: mol_type = other DNA
cacgcctgcctgggctgctccaaggtggtggctaggggtggcacaagttacacattttcaatttggataggttgtgattcttgtcttccccagtcagatacctacagccgctgagagccggtattccaacgccatgagacgccttctgtcgtgagcagttgacaagaaagacccagcacttactgcaaccggaaggagcggttcctccctcgctcgcgcagccgctcttccccgccactccctcggtgcccgccagcacattcccagcaagccctgagtatatttgcatatcaactcactacatttttttcttctaactaaaaaatcgaaaggacaaattccagattctccttgtgaagtcttcctttcagttcagaagaaatggaattcgctcttcaacttcaggaagttgaaataaagagttgcttggattttgtgttcacctttaccaaaaaatggatttggtaacactgccaccctgctttggtgacagagaaagcaatgatagggacttagggtgatagaagtgcaaagcatgactgtcaaatttttggagcaggttttctgacttcggtcggaaaacccctttcccttcttgtaatacaaaataataacaaccacagaggacatcgcaagtaaaatgtgtataacaaccccatctaaagaaccctatcatctttctactatctgtctacctaaatatgtatagtataaataaccctatatagcactctaagcaacttaagttaggtaacttagaaaactcttttttttttttgagactgagtctcactctgtcgcacccaggctggagtgcagtggcgtgatctcggctcactgcaacctccaccttctgggttcaagtgattctcccatctcagtctcccaagtagctgggattacaggcacgccaccatgccctgctacatttttttttttttagtagagatgaggtttcaccacattggccaggctgttctcgaactcctgacctcaggtgatccgcccaccttggcctcatgaagtgctgggattacaggtgtgagccactgtacccagccagaaaactcttaaaaaac

SEQ ID NO: 589 - DNA, 969 bp, synthetic construct
  source 1..969: mol_type = other DNA
cacgcctgcctgggctgctccaaggtggtggctaggggtggcacaagttacacattttcaatttggataggttgtgattcttgtcttccccagtcagatacctacagccgctgagagccggtattccaacgccatgagacgccttctgtcgtgagcagttgacaagaaagacccagcacttactgcaaccggaaggagcggttcctccctcgctcgcgcagccgctcttccccgccactccctcggtgcccgccagcacattcccagcaagccctgagtatatttgcatatcaactcactacatttttttcttctaactaaaaaatcgaaaggacaaattccagattctccttgtgaagtcttcctttcagttcagaagaaatggaattcgctcttcaacttcaggaagttgaaataaagagttgcttggattttgtgttcacctttaccaaaaaatggatttggtaacactgccaccctgctttggtgacagagaaagcaatgatagggacttagggtgatagaagtgcaaagcatgactgtcaaatttttggagcaggttttctgacttcggtcggaaaacccctctgaattttcttgcagttgaacaacagaggctttttttgtgtgtgtgggggtgcttggttttgggaggttgaagagtacttgttcgcaaactctctaaatgagagatggggaagtgtcttaccagctgattcgcgagagcacctgcaagtttacctgttttagtgatttgcgtttatgaaagttggagttgctgattttgtgatctctacttttaaggtaaaagcagggcggtgttgacttttcttgccagttggctgtcctgttttctttctcgcactgttttctttttgagacgaagtctgtcgctcaggctggagtgcactggcgtgatctcggctcgctgcaaactttgccgaacccctgtttagcgatttccgtttg

SEQ ID NO: 590 - DNA, 1087 bp, synthetic construct
  source 1..1087: mol_type = other DNA
cacgcctgcctgggctgctccaaggtggtggctaggggtggcacaagttacacattttcaatttggataggttgtgattcttgtcttccccagtcagatacctacagccgctgagagccggtattccaacgccatgagacgccttctgtcgtgagcagttgacaagaaagacccagcacttactgcaaccggaaggagcggttcctccctcgctcgcgcagccgctcttccccgccactccctcggtgcccgccagcacattcccagcaagccctgagtatatttgcatatcaactcactacatttttttcttctaactaaaaaatcgaaaggacaaattccagattctccttgtgaagtcttcctttcagttcagaagaaatggaattcgctcttcaacttcaggaagttgaaataaagagttgcttggattttgtgttcacctttaccaaaaaatggatttggtaacactgccaccctgctttggtgacagagaaagcaatgatagggacttagggtgatagaagtgcaaagcatgactgtcaaatttttggagcaggttttctgacttcggtcggaaaacccctatatgtggtaatccaacaatagaaattatttttaagtttgtgtgttcctttttctgttcaatggtgcttttgatattgttgtaaagcagtgactagcagattctgtgtggtaaaagcactgaaccctgtttagttcttttctccctaccttattggtaattatttctgtgtatatatgttccaaagaaatgcggcttgtatattcatgcttttcaactttttgtgatagacagttgatacacaagtagtacctcctccgggatcttcttagtcaagactgtttggtagatgcatgttttttgttacttgtaatgtacagtattcagttcattttctttttgcagcactgtccggttgaaacacaacgcgaggatcgggcgtggtggctcacgcctgtaatcccagcactttgggaggccgaggcaggacaatcaagaccaatcctggtcatcaaggcaggagaatcaagaccatcgaggtcaggagatcaagaccatcct

SEQ ID NO: 591 - DNA, 1085 bp, synthetic construct
  source 1..1085: mol_type = other DNA
cacgcctgcctgggctgctccaaggtggtggctaggggtggcacaagttacacattttcaatttggataggttgtgattcttgtcttccccagtcagatacctacagccgctgagagccggtattccaacgccatgagacgccttctgtcgtgagcagttgacaagaaagacccagcacttactgcaaccggaaggagcggttcctccctcgctcgcgcagccgctcttccccgccactccctcggtgcccgccagcacattcccagcaagccctgagtatatttgcatatcaactcactacatttttttcttctaactaaaaaatcgaaaggacaaattccagattctccttgtgaagtcttcctttcagttcagaagaaatggaattcgctcttcaacttcaggaagttgaaataaagagttgcttggattttgtgttcacctttaccaaaaaatggatttggtaacactgccaccctgctttggtgacagagaaagcaatgatagggacttagggtgatagaagtgcaaagcatgactgtcaaatttttggagcaggttttctgacttcggtcggaaaacccctacatcaggttgtttttctgtttttacatcaggttgtttttctgtttggttttttttttacaccacgtttatacgccggtgcacggtttaccactgaaaacacctttcatctacaggtgatatcttttaacacaaataaaatgtagtagtcctaggagacggaatagaaggaggtggggcctaggcagattcatctctgcggtgcattttgcctctggccctcgggccctagtttgcgatctttcccatcttgcctctgcttccctctgcacaatcctgagtattgcagtaccttacacttaaggaaatttcgtcttgccaaagttgatccatttcagctccgaaacataacaggaactagtgcaacgataaacgtatgaggaacttgcaataagagtgacagaatcctttgaatcaaaaaaaaaaaaagccaccacttaatgagtatctaccatatgtcaagggcttcaccaatatttcattgaaatattccagacca

SEQ ID NO: 592 - DNA, 1087 bp, synthetic construct
  source 1..1087: mol_type = other DNA
cacgcctgcctgggctgctccaaggtggtggctaggggtggcacaagttacacattttcaatttggataggttgtgattcttgtcttccccagtcagatacctacagccgctgagagccggtattccaacgccatgagacgccttctgtcgtgagcagttgacaagaaagacccagcacttactgcaaccggaaggagcggttcctccctcgctcgcgcagccgctcttccccgccactccctcggtgcccgccagcacattcccagcaagccctgagtatatttgcatatcaactcactacatttttttcttctaactaaaaaatcgaaaggacaaattccagattctccttgtgaagtcttcctttcagttcagaagaaatggaattcgctcttcaacttcaggaagttgaaataaagagttgcttggattttgtgttcacctttaccaaaaaatggatttggtaacactgccaccctgctttggtgacagagaaagcaatgatagggacttagggtgatagaagtgcaaagcatgactgtcaaatttttggagcaggttttctgacttcggtcggaaaacccctcttatgatgtttgttgccaatgatagattgttttcactgtgcaaaaattatgggtagttttggtggtcttgatgcagttgtaagcttggggtatgaaggtttgggccacgcctgggcgcttccggctgcgccggatgctgtttcctttccgctcccaggggcgttgggaacggttgtaggacgtggctctttattcgtgagttttccatttacctccgctgaacctagagcttcagacgccctatggcgtccgcctcgacccaaccggcggccttgagcgctgagcaagcaaagggtgagaatcgtcctagtcaaggcataggctgctggcctggggtagtcaaggcatgggctgctggtctggggaggatgcgggcggaggatgtggggcgacaaacctggctacgtccgccgggaaaatggggtaggggacgccgggtaccgtccttctaagtggggcgcttgcccccaagacttgggatcttattgggttacctaca

SEQ ID NO: 593 - DNA, 1085 bp, synthetic construct
  source 1..1085: mol_type = other DNA
cacgcctgcctgggctgctccaaggtggtggctaggggtggcacaagttacacattttcaatttggataggttgtgattcttgtcttccccagtcagatacctacagccgctgagagccggtattccaacgccatgagacgccttctgtcgtgagcagttgacaagaaagacccagcacttactgcaaccggaaggagcggttcctccctcgctcgcgcagccgctcttccccgccactccctcggtgcccgccagcacattcccagcaagccctgagtatatttgcatatcaactcactacatttttttcttctaactaaaaaatcgaaaggacaaattccagattctccttgtgaagtcttcctttcagttcagaagaaatggaattcgctcttcaacttcaggaagttgaaataaagagttgcttggattttgtgttcacctttaccaaaaaatggatttggtaacactgccaccctgctttggtgacagagaaagcaatgatagggacttagggtgatagaagtgcaaagcatgactgtcaaatttttggagcaggttttctgacttcggtcggaaaaccccttctttactgttatatgttaggcgaaatattacgcgtttggagtaagtggtgctttttgtaactgaaaagagattctgtgtgtgtttttttttttttagaggctgcatagttatttgtatgaaccgcaggtgacctaattagcaaggtaattcagacctgtatcctagcacttaagaagtggaagtgggataaccctgcgtgttctcgtgtgggaggctagcttaagcaacaaagcaggaaggccccaccaacaaaagaatttaaaaattatacgtgcgtggtggcgcgcgtatgaggaaattatttggcaactgtgttacagtatagcagcaaatggaatagacctagtccctgactttaggagacctgcctcagccccccgaatggctgggactacaggcgtgcgcctccgcgcccagctaatttttgcatttttggtagagacgggttcaccatgttggccaggatggtctccatctcttcatctggtgatccgcc

SEQ ID NO: 594 - DNA, 1087 bp, synthetic construct
  source 1..1087: mol_type = other DNA
cacgcctgcctgggctgctccaaggtggtggctaggggtggcacaagttacacattttcaatttggataggttgtgattcttgtcttccccagtcagatacctacagccgctgagagccggtattccaacgccatgagacgccttctgtcgtgagcagttgacaagaaagacccagcacttactgcaaccggaaggagcggttcctccctcgctcgcgcagccgctcttccccgccactccctcggtgcccgccagcacattcccagcaagccctgagtatatttgcatatcaactcactacatttttttcttctaactaaaaaatcgaaaggacaaattccagattctccttgtgaagtcttcctttcagttcagaagaaatggaattcgctcttcaacttcaggaagttgaaataaagagttgcttggattttgtgttcacctttaccaaaaaatggatttggtaacactgccaccctgctttggtgacagagaaagcaatgatagggacttagggtgatagaagtgcaaagcatgactgtcaaatttttggagcaggttttctgacttcggtcggaaaacccctaccttattcacgcctaaaaagtagactgactgtggggtggtcgtgttttttgtttcttgttggtaggtggtgaatgcgtttttttcgttgttttctccgttactcaggctgccagttgcttggcagtcttgtcgctggctgtggacgctctgcacttcatcaccgtccccagctgcgctttgagccggtctaaggttgcccacagtattgacgttgggacccacgaaactggcaatttccatgtgtgcggccttacccagttctcccaaacttctgcgtataaccgcttctctgtgcttcagaaagataagtccggccccggcctcacacagcagctcagttcgtgacagcgtttaatatgtaaaatggagcaaataatttatagggcgttgggagagttaaagagactaattcatttacgtgttaaatacagggaatggcttttgcattgatataaccccagcctccagcatgcgccagacctgacgtaggtgttcggc

SEQ ID NO: 595 - DNA, 1087 bp, synthetic construct
  source 1..1087: mol_type = other DNA
cacgcctgcctgggctgctccaaggtggtggctaggggtggcacaagttacacattttcaatttggataggttgtgattcttgtcttccccagtcagatacctacagccgctgagagccggtattccaacgccatgagacgccttctgtcgtgagcagttgacaagaaagacccagcacttactgcaaccggaaggagcggttcctccctcgctcgcgcagccgctcttccccgccactccctcggtgcccgccagcacattcccagcaagccctgagtatatttgcatatcaactcactacatttttttcttctaactaaaaaatcgaaaggacaaattccagattctccttgtgaagtcttcctttcagttcagaagaaatggaattcgctcttcaacttcaggaagttgaaataaagagttgcttggattttgtgttcacctttaccaaaaaatggatttggtaacactgccaccctgctttggtgacagagaaagcaatgatagggacttagggtgatagaagtgcaaagcatgactgtcaaatttttggagcaggttttctgacttcggtcggaaaaccccttttgacccattacccatctaagttagatgcttttttaaatgttttttaatttttaaatttttaatttttttcattatttattttttatttttgagacggatctcggctcactgtaacctccacctcccgggttcaagcgattctcctgactcagcctcccgagtagctgggattacaggcgcgcgccaccatgcccggctaatttttctatttttagtaaagacggggtttcgccatgttgaccagggtggtcttgaactcctgacgtcaggtgatcctcctgcctcgtgctgggattgcaggcgtgagccaccgctcccggcccttagatgctttttaatcagcaagtacgcaatgctttcctgacaggaatgtcaagtccgtcaggaaatccacataagggtgttaagcaggcaaagtaccacatacagattaaaatcaaaagcactgtcaacgcttatttaatttatacagtagaccctaacttttctaattttgtg

SEQ ID NO: 596 - DNA, 1087 bp, synthetic construct
  source 1..1087: mol_type = other DNA
cacgcctgcctgggctgctccaaggtggtggctaggggtggcacaagttacacattttcaatttggataggttgtgattcttgtcttccccagtcagatacctacagccgctgagagccggtattccaacgccatgagacgccttctgtcgtgagcagttgacaagaaagacccagcacttactgcaaccggaaggagcggttcctccctcgctcgcgcagccgctcttccccgccactccctcggtgcccgccagcacattcccagcaagccctgagtatatttgcatatcaactcactacatttttttcttctaactaaaaaatcgaaaggacaaattccagattctccttgtgaagtcttcctttcagttcagaagaaatggaattcgctcttcaacttcaggaagttgaaataaagagttgcttggattttgtgttcacctttaccaaaaaatggatttggtaacactgccaccctgctttggtgacagagaaagcaatgatagggacttagggtgatagaagtgcaaagcatgactgtcaaatttttggagcaggttttctgacttcggtcggaaaacccctgtttacttggttttaaaaatagcttgcactagcgataccgcgaatatggttattaggtttgttaggcacagtcgtgtcttactatagaaaaataacgtagtgttcattttgctgcctgtatgtgttaatttgtccttattgcgccattgttcttgttaagtcttctgtaaggagttgcgggtttcaaactgtcagtctgagagcataagctcacttttcagtcagttgaattgaatgttacattcgattggttctggatattgatattacccaaggcttgtcctgtttgtaagtcttttcctacacctgacaatatgattatgtttacaatgtccctagaactctgggtgtatcgttcccactgaataaaatttgatctctaagttgacctataaatttaagtaccaaaaaactggtttgtaagattttggaaggcagaggcagggaagagaccaacgtggtctacatataaagtaccaggtacatataaagtaccaggt

SEQ ID NO: 597 - DNA, 1083 bp, synthetic construct
  source 1..1083: mol_type = other DNA
cacgcctgcctgggctgctccaaggtggtggctaggggtggcacaagttacacattttcaatttggataggttgtgattcttgtcttccccagtcagatacctacagccgctgagagccggtattccaacgccatgagacgccttctgtcgtgagcagttgacaagaaagacccagcacttactgcaaccggaaggagcggttcctccctcgctcgcgcagccgctcttccccgccactccctcggtgcccgccagcacattcccagcaagccctgagtatatttgcatatcaactcactacatttttttcttctaactaaaaaatcgaaaggacaaattccagattctccttgtgaagtcttcctttcagttcagaagaaatggaattcgctcttcaacttcaggaagttgaaataaagagttgcttggattttgtgttcacctttaccaaaaaatggatttggtaacactgccaccctgctttggtgacagagaaagcaatgatagggacttagggtgatagaagtgcaaagcatgactgtcaaatttttggagcaggttttctgacttcggtcggaaaacccctatttttgtggtgctaaaagttagattgcattccgcccttctcacgtctctttacgtgttgtttgcgaggcgtggcctcggaggtaaatggtctccttttacctcagataagcttacctttgctctgtgagtaagaatgtagctacacttccaaatttagctattgtcctttgcggtccaaatgaaaatattaccttccgatctaacaatgttaaactagtcccaggcccttctatcgattgccagaatagactagactactacacagacacaccctctcaaatcaggccagctcctgcaacctgcacctacagtttgtcccctgggacaaatgaaaggacaggccctctttcccccccccccccaaatcagagcacacacagatcttggggtctggggcagaaatttcgttcatggaaaaaacaaacaaacaaacaaacacgatcaaaggaagctcgttccctttggcctcagggtttcttagacgccgtgttccc

SEQ ID NO: 598 - DNA, 1084 bp, synthetic construct
  source 1..1084: mol_type = other DNA
cacgcctgcctgggctgctccaaggtggtggctaggggtggcacaagttacacattttcaatttggataggttgtgattcttgtcttccccagtcagatacctacagccgctgagagccggtattccaacgccatgagacgccttctgtcgtgagcagttgacaagaaagacccagcacttactgcaaccggaaggagcggttcctccctcgctcgcgcagccgctcttccccgccactccctcggtgcccgccagcacattcccagcaagccctgagtatatttgcatatcaactcactacatttttttcttctaactaaaaaatcgaaaggacaaattccagattctccttgtgaagtcttcctttcagttcagaagaaatggaattcgctcttcaacttcaggaagttgaaataaagagttgcttggattttgtgttcacctttaccaaaaaatggatttggtaacactgccaccctgctttggtgacagagaaagcaatgatagggacttagggtgatagaagtgcaaagcatgactgtcaaatttttggagcaggttttctgacttcggtcggaaaacccctataactggtaaccaaaagcagattactttcccccttgtggtcttcgcgtttgcggacgggagagaactttcggccattttccttttagaaatttaacttcttgaaggccaccaggtgacccttacttccctctcacctttccttctacctgtactttctctattaaaaagcctgcagaagtacccttgacaaattgccaaaaatgacacctaaaaaaaaaaaaaggaaaaacgacaccttaggtaattataggttgtaagaaaaagatttgacctcttggagtttttatttcttaataccaaaggacacccaaggaacgtatctctcaaaattgggtttcaaacctcagccgtttccttcttagttccagtgcttaacacgcaacagacctgcacaccactacactgcatacgagttttaaagttaataaatcagtcacccctccatagtcttctacctacttgaagacagaaacggctgctaggaagcaattcttc

SEQ ID NO: 599 - DNA, 1087 bp, synthetic construct
  source 1..1087: mol_type = other DNA
cacgcctgcctgggctgctccaaggtggtggctaggggtggcacaagttacacattttcaatttggataggttgtgattcttgtcttccccagtcagatacctacagccgctgagagccggtattccaacgccatgagacgccttctgtcgtgagcagttgacaagaaagacccagcacttactgcaaccggaaggagcggttcctccctcgctcgcgcagccgctcttccccgccactccctcggtgcccgccagcacattcccagcaagccctgagtatatttgcatatcaactcactacatttttttcttctaactaaaaaatcgaaaggacaaattccagattctccttgtgaagtcttcctttcagttcagaagaaatggaattcgctcttcaacttcaggaagttgaaataaagagttgcttggattttgtgttcacctttaccaaaaaatggatttggtaacactgccaccctgctttggtgacagagaaagcaatgatagggacttagggtgatagaagtgcaaagcatgactgtcaaatttttggagcaggttttctgacttcggtcggaaaacccctctggggaataagagtggtttaaagaaagaacaatttgagagatctgcttagatctaataaaacccaagtatagtttctttagacgtcttatatctcacgtaggacctcttatttcagactcactgcaagaacaagctaaagaactatatacagtcaggaacaaggtgagccatcgcggttctcagtcccatgatcttaagagtttttcctcttcccctcttccctggctgtcctggagctcactctgtagaccaggctggtctcaaactcagaaatccacttacctctgcctcccaagggctgggattaaaggcatgcaccaccattgcccggcagggtatgtggactatgctgtccttcaactcagagatcgtggtactttaaatctcattttccgaaagaaaagaaaagaaaggaaggggggaaataaagccagtatattttgcacccacaatctgaagttctacaaatattgttagaaaatgcaaaggacccaagtc

SEQ ID NO: 600 - DNA, 1087 bp, synthetic construct
  source 1..1087: mol_type = other DNA
cacgcctgcctgggctgctccaaggtggtggctaggggtggcacaagttacacattttcaatttggataggttgtgattcttgtcttccccagtcagatacctacagccgctgagagccggtattccaacgccatgagacgccttctgtcgtgagcagttgacaagaaagacccagcacttactgcaaccggaaggagcggttcctccctcgctcgcgcagccgctcttccccgccactccctcggtgcccgccagcacattcccagcaagccctgagtatatttgcatatcaactcactacatttttttcttctaactaaaaaatcgaaaggacaaattccagattctccttgtgaagtcttcctttcagttcagaagaaatggaattcgctcttcaacttcaggaagttgaaataaagagttgcttggattttgtgttcacctttaccaaaaaatggatttggtaacactgccaccctgctttggtgacagagaaagcaatgatagggacttagggtgatagaagtgcaaagcatgactgtcaaatttttggagcaggttttctgacttcggtcggaaaacccctctcggtttatcttaaagggttttaaatatagaaagcttccttagtcttatgggtgagagtgctgtttaagccttacctaggtatgtctttgaacatttattacagattgttatttgtgactatgaccactcaggtgttctgttcttgtgaatttagacacactcagaaaggctacacactcaaagaccacaccaaagtgaagtactatctgggccgtgaaactggtcacatatcagttattttgcagtaaaacaaggaagtcaatcatactgcttcagtgggtcagggagtcaagaatgcacagtacaagagctggtgagattcctcagcaggtaagagcactgaatgctcttccaaagattctgagttcaaatcccagcaaccacgtggtggatttgaacaaaggatgaaaacaaccatccataaccagatctgatgccctcttctggagtgtcaaaagacagctatggtgtacttacataaataaataagtaaaaaca

SEQ ID NO: 601 - DNA, 1087 bp, synthetic construct
  source 1..1087: mol_type = other DNA
cacgcctgcctgggctgctccaaggtggtggctaggggtggcacaagttacacattttcaatttggataggttgtgattcttgtcttccccagtcagatacctacagccgctgagagccggtattccaacgccatgagacgccttctgtcgtgagcagttgacaagaaagacccagcacttactgcaaccggaaggagcggttcctccctcgctcgcgcagccgctcttccccgccactccctcggtgcccgccagcacattcccagcaagccctgagtatatttgcatatcaactcactacatttttttcttctaactaaaaaatcgaaaggacaaattccagattctccttgtgaagtcttcctttcagttcagaagaaatggaattcgctcttcaacttcaggaagttgaaataaagagttgcttggattttgtgttcacctttaccaaaaaatggatttggtaacactgccaccctgctttggtgacagagaaagcaatgatagggacttagggtgatagaagtgcaaagcatgactgtcaaatttttggagcaggttttctgacttcggtcggaaaacccctccacattttgtgtttaaaaatagaaatatttaagtgagatcagtttaaatctgctttatctagggtgtctaactgcttgcatctttttaacttttccttatttgtgagaaggtctgtaaaacttattatatgttagtacactgtagctgtcttcagacactccagaagagggattcagatcaccttacagatggttttgagccaccatgtggttgctgggatttgaactcaggacctttagaaaagtagttgggtgctcttacccgctgagccatctcaccagccctttttttttcttttttccagttcgggtttctctgtgtgtagccctggctgtcctggaactcattctgtagaccgggctggcctcgaactcagaaatctgcctgcctctgcctcccaagtgctgggattaaaggaatgtgccttcattgcccggctctagggctttttgttgttgtttgtttgtttgtttgtttgtttgcttttgtggatggcct

SEQ ID NO: 602 - DNA, 1087 bp, synthetic construct
  source 1..1087: mol_type = other DNA
cacgcctgcctgggctgctccaaggtggtggctaggggtggcacaagttacacattttcaatttggataggttgtgattcttgtcttccccagtcagatacctacagccgctgagagccggtattccaacgccatgagacgccttctgtcgtgagcagttgacaagaaagacccagcacttactgcaaccggaaggagcggttcctccctcgctcgcgcagccgctcttccccgccactccctcggtgcccgccagcacattcccagcaagccctgagtatatttgcatatcaactcactacatttttttcttctaactaaaaaatcgaaaggacaaattccagattctccttgtgaagtcttcctttcagttcagaagaaatggaattcgctcttcaacttcaggaagttgaaataaagagttgcttggattttgtgttcacctttaccaaaaaatggatttggtaacactgccaccctgctttggtgacagagaaagcaatgatagggacttagggtgatagaagtgcaaagcatgactgtcaaatttttggagcaggttttctgacttcggtcggaaaacccctaaaaccagtaagggagaaaggtcaagtaacatataaaggaaggcctatcagaattacaccagacttttcaccagagactatgaaagccagaagagcctggacagatgttatacagacactaagagaacacaaatgccagcccaggctactatacctggccaaactctcaattaccatagatggagaaaccaaagtattccacgacaaaaacaaattcacacaatatctttccacgaatccagcccttcaaaggataatgacagaaaagaagcaatacaaggacggaaatcacgccctagaacaaccaagaaactaatcattcaacaaaccaaaaagaagacagccacaagaacagaatgccaactctaacaacaaaaataaaaggaagcaacaattacttttccttaatatctcttaatatcaatggactcaattccccaataaaaagacatagactaacagactggctacacaaacaggacccaacattctgctgctta

SEQ ID NO: 603 - DNA, 1087 bp, synthetic construct
  source 1..1087: mol_type = other DNA
cacgcctgcctgggctgctccaaggtggtggctaggggtggcacaagttacacattttcaatttggataggttgtgattcttgtcttccccagtcagatacctacagccgctgagagccggtattccaacgccatgagacgccttctgtcgtgagcagttgacaagaaagacccagcacttactgcaaccggaaggagcggttcctccctcgctcgcgcagccgctcttccccgccactccctcggtgcccgccagcacattcccagcaagccctgagtatatttgcatatcaactcactacatttttttcttctaactaaaaaatcgaaaggacaaattccagattctccttgtgaagtcttcctttcagttcagaagaaatggaattcgctcttcaacttcaggaagttgaaataaagagttgcttggattttgtgttcacctttaccaaaaaatggatttggtaacactgccaccctgctttggtgacagagaaagcaatgatagggacttagggtgatagaagtgcaaagcatgactgtcaaatttttggagcaggttttctgacttcggtcggaaaacccctcccaatttcactggtctacaatgaaagcaaaacagttctcttccccgctccccggtgtgtgagaggggctttgatccttctctggtttcctaggaaacgcgtatgtgctagagccacgctctgagacttccgcctcgtgcggtcccgcttcctttctgcctcctctggcctgcatccgtgggggaggtggctggctgcagggttctccggatctcttctgtgttcccactactcaagcaccgagtggcgttctatggcgtccgcctcggctcagcccgcggccctgagcgcggagcaggccaagggtgaggaaagagcctagtctgggtgtgggccgtcttctggggggagggcgcgatactattctttgcctctccaagtggggcccttgcccattagggcgaagggttgggaggacaagcttatcgggttgcttgcaggcctcggcccactaattccctgcctcttccctcctctgggctcgcccgccgtcctccgcg

SEQ ID NO: 604 - DNA, 1087 bp, synthetic construct
  source 1..1087: mol_type = other DNA
cacgcctgcctgggctgctccaaggtggtggctaggggtggcacaagttacacattttcaatttggataggttgtgattcttgtcttccccagtcagatacctacagccgctgagagccggtattccaacgccatgagacgccttctgtcgtgagcagttgacaagaaagacccagcacttactgcaaccggaaggagcggttcctccctcgctcgcgcagccgctcttccccgccactccctcggtgcccgccagcacattcccagcaagccctgagtatatttgcatatcaactcactacatttttttcttctaactaaaaaatcgaaaggacaaattccagattctccttgtgaagtcttcctttcagttcagaagaaatggaattcgctcttcaacttcaggaagttgaaataaagagttgcttggattttgtgttcacctttaccaaaaaatggatttggtaacactgccaccctgctttggtgacagagaaagcaatgatagggacttagggtgatagaagtgcaaagcatgactgtcaaatttttggagcaggttttctgacttcggtcggaaaacccctgaatttgttaaattacaggaggaagcttttttagttcattttacaaatactttcttgttaggtagataataccttctaaggttattatctggatcttctaagtctttttatcgctagcaagtctaagtttctggactttggaattagaagttaatgtcgtaggcgggcatggtggtccacgcctttaatcccagagtttgggaggcagacgcaggtggttttctgagttcgaggccatcctgctcttcaatgttagttccaggacagccagggttatacaaagaaaccctgtctcgagaaacaaaacaaacaaaaaaagagtagctgagtgctctgagttgtctctccagccccttagctatttattttcatttaaattatttttgttttattcgcttgtgtgcctgagtttgaatttcccgggattaacagttgaagactagggctggtgagatggctcagcggttaagattgccgactgctcttccaaaggtcctgag

SEQ ID NO: 605 - DNA, 1087 bp, synthetic construct
  source 1..1087: mol_type = other DNA
cacgcctgcctgggctgctccaaggtggtggctaggggtggcacaagttacacattttcaatttggataggttgtgattcttgtcttccccagtcagatacctacagccgctgagagccggtattccaacgccatgagacgccttctgtcgtgagcagttgacaagaaagacccagcacttactgcaaccggaaggagcggttcctccctcgctcgcgcagccgctcttccccgccactccctcggtgcccgccagcacattcccagcaagccctgagtatatttgcatatcaactcactacatttttttcttctaactaaaaaatcgaaaggacaaattccagattctccttgtgaagtcttcctttcagttcagaagaaatggaattcgctcttcaacttcaggaagttgaaataaagagttgcttggattttgtgttcacctttaccaaaaaatggatttggtaacactgccaccctgctttggtgacagagaaagcaatgatagggacttagggtgatagaagtgcaaagcatgactgtcaaatttttggagcaggttttctgacttcggtcggaaaacccctaccccctaattctacaagaatagaaagcttagcagctcctctgaatggttgctctcaggtgctagtggttgcaagtcgtatgttgatgcctgcctttgccctacctggtgtgtgagcgtgagcgcgccccacctctccagcctctctcttactgtttttcagacaagatgggactgttgttctcctactgctatgtacctcaatttcaattgatcatgcctggacataactgcccatgttgtaaggtcgtctacgttgtaaggtcgtgctcagtttctgatgcctagactagtcacctttccgtttgcctcctgactgtgtaaatgaggcaaatgaaggtggtctcttaactgacatgttagtgtttgacctatgggatagtttctcattgttgagacagaatttctagaagctggtccgctgagcggctaagagcacttgctgatattgcaaaggatctacctgggtttggttctcagcactcacatggaagttcacat

SEQ ID NO: 606 - DNA, 654 bp, synthetic construct
  source 1..654: mol_type = other DNA
cacgcctgcctgggctgctccaaggtggtggctaggggtggcacaagttacacattttcaatttggataggttgtgattcttgtcttccccagtcagatacctacagccgctgagagccggtattccaacgccatgagacgccttctgtcgtgagcagttgacaagaaagacccagcacttactgcaaccggaaggagcggttcctccctcgctcgcgcagccgctcttccccgccactccctcggtgcccgccagcacattcccagcaagccctgagtatatttgcatatcaactcactacatttttttcttctaactaaaaaatcgaaaggacaaattccagattctccttgtgaagtcttcctttcagttcagaagaaatggaattcgctcttcaacttcaggaagttgaaataaagagttgcttggattttgtgttcacctttaccaaaaaatggatttggtaacactgccaccctgctttggtgacagagaaagcaatgatagggacttagggtgatagaagtgcaaagcatgactgtcaaatttttggagcaggttttctgacttcggtcggaaaaccccttgtagttcctgcaatttaattttcgtttaaaactttattttattctttaacttaaaaaaaatatata

SEQ ID NO: 607 - DNA, 1087 bp, synthetic construct
  source 1..1087: mol_type = other DNA
tcgagctccactaggccgaggaccctaaaccccgaagaaaggaaaggcctctcaccgtcctttcgccgccgccccgcgcttcctgatgagttcgtccagggagatgtccgccatcttgctccgccgagcaagccgaaagcagtcgagaccccgcgagcccgccccttcggccgctagggagcgacgaactacttccggcgtccgcggaccaactctcgcgacagccagctcaaagcaggcaagaaccggaaggggcggggacgttccccgtgagccttcgcggtgctggctgctcatctgcatacggaagttcggcacattatgaattatttattttcctcgagggaaaaaattaaatgaaaagcaacaaaatacattattaacaagtgagacaaacttcaatggaactggatcatgacctcaacagtcaactacgatagtcatcatacgcctaatgagaatagaattcattacctaggaaataaactaaaaacgtccttaatgatagggacttagggtgatagaagtgcaaagcatgactgtcaaatttttggagcaggttttctgacttcggtcggaaaacccctactttctggagtttcaaaaacagactgtacgccaagggtcatatctttttttgtattggtttgtgtcttggttggtgtcttaggtgttaatcctacagtggagggtttatgggaataggaagtaacatgtcgcctgcatgtcataggagaaaaagcgagcatcagccgtatcggctttgtaacacaaattagctatcgtgaagtccgctcagctcttccctttctaccctggctgctttttgcagggattggtccgtggtctccagtctcttgggttctcaccctgtgtgaaaatcttcgtgtttttccctaccccccagtcacctcttacacagcctctgcttccaagcgcagcccccacaggagtttgtaggatttctgtgctagcggggaatgtgttctcacctcatagagccaggtagaaattatgcagatgggcagttctctgggaagaaagcagggcctttggggctctcagtgtccccgttgggttgtagaca

SEQ ID NO: 608 - DNA, 1087 bp, synthetic construct
  source 1..1087: mol_type = other DNA
tcgagctccactaggccgaggaccctaaaccccgaagaaaggaaaggcctctcaccgtcctttcgccgccgccccgcgcttcctgatgagttcgtccagggagatgtccgccatcttgctccgccgagcaagccgaaagcagtcgagaccccgcgagcccgccccttcggccgctagggagcgacgaactacttccggcgtccgcggaccaactctcgcgacagccagctcaaagcaggcaagaaccggaaggggcggggacgttccccgtgagccttcgcggtgctggctgctcatctgcatacggaagttcggcacattatgaattatttattttcctcgagggaaaaaattaaatgaaaagcaacaaaatacattattaacaagtgagacaaacttcaatggaactggatcatgacctcaacagtcaactacgatagtcatcatacgcctaatgagaatagaattcattacctaggaaataaactaaaaacgtccttaatgatagggacttagggtgatagaagtgcaaagcatgactgtcaaatttttggagcaggttttctgacttcggtcggaaaacccctactttctggagtttctaaaagtagactgtacgctaagggtcatatctttttttgttttggtttgtgtcttggttggcgtcttaaatgttaatcctacagtggagggctggcgaataggaagtaacatgtcgcctgcacgccataggagaaaaagcgagcatcagccgtatcggctttgtaacacaaattagctatcgtgaagtccgctcagctcttccctttctaccctggctgctttttgcagggattggtccgtggtctccagtctcttgggttctcaccctgtgtgaaaatcttcctgtttttccctaccccccaagtcacctcttacacagcctctgcttccaagcgcagcccccacaggagtttgtaggatttctgtgctagcggggagtgtgttctcacctcatagagccaggtagaaactacgcagatgggtgctgttctccaggaagaaagcagggcctttggggctctcagtgtccccgttgggttgtaga

SEQ ID NO: 609 - DNA, 1087 bp, synthetic construct
  source 1..1087: mol_type = other DNA
tcgagctccactaggccgaggaccctaaaccccgaagaaaggaaaggcctctcaccgtcctttcgccgccgccccgcgcttcctgatgagttcgtccagggagatgtccgccatcttgctccgccgagcaagccgaaagcagtcgagaccccgcgagcccgccccttcggccgctagggagcgacgaactacttccggcgtccgcggaccaactctcgcgacagccagctcaaagcaggcaagaaccggaaggggcggggacgttccccgtgagccttcgcggtgctggctgctcatctgcatacggaagttcggcacattatgaattatttattttcctcgagggaaaaaattaaatgaaaagcaacaaaatacattattaacaagtgagacaaacttcaatggaactggatcatgacctcaacagtcaactacgatagtcatcatacgcctaatgagaatagaattcattacctaggaaataaactaaaaacgtccttaatgatagggacttagggtgatagaagtgcaaagcatgactgtcaaatttttggagcaggttttctgacttcggtcggaaaacccctactttctggagtttcaaaaacagaccgtacgccaagggtcatgtcttttttcgtattggtttgtgtcttagttgttaatcctacagtggaggcctggggaataagaagtaacatgtggcctgcacgccataggagaaaaagcgagcatcagccgtatcggctttgtaacacaaattagctatcgtgaagtccgctcagctcttccatttctaccctggctgctttttgcagggattggtccgtggtctccagtctcttgggttctcaccctgtgtgaaaatcttcgtgtttttccctaccccccaagtcacctcttacacagcctctgcttccaagcgcagcccccacaggagtttgtaggatttctgtgctagcggggagtgtgttctcacctcatagagccaggtagaaattatgcagatgggcgctgttctctgggaagaaagcagggcctttggggctctcagtgtccccgttgggttgtagacataacactctta

SEQ ID NO: 610 - DNA, 891 bp, synthetic construct
  source 1..891: mol_type = other DNA
tcgagctccactaggccgaggaccctaaaccccgaagaaaggaaaggcctctcaccgtcctttcgccgccgccccgcgcttcctgatgagttcgtccagggagatgtccgccatcttgctccgccgagcaagccgaaagcagtcgagaccccgcgagcccgccccttcggccgctagggagcgacgaactacttccggcgtccgcggaccaactctcgcgacagccagctcaaagcaggcaagaaccggaaggggcggggacgttccccgtgagccttcgcggtgctggctgctcatctgcatacggaagttcggcacattatgaattatttattttcctcgagggaaaaaattaaatgaaaagcaacaaaatacattattaacaagtgagacaaacttcaatggaactggatcatgacctcaacagtcaactacgatagtcatcatacgcctaatgagaatagaattcattacctaggaaataaactaaaaacgtccttaatgatagggacttagggtgatagaagtgcaaagcatgactgtcaaatttttggagcaggttttctgacttcggtcggaaaacccctcctccggggatacaacgtgtttcctaaaagtagagggaggtaagagacggtagcacctgcggggcggcttgcacgccgagtgcctgtgacgcgccggcttaacttaactgcttccctgaagtaccttgaggttcctgatgtgcgggcggtagacggtaggcttatgcggcacgctgtcgtttccaccgtggctactgcgctttgggaaggccacgacctcctcctttggggaggtccttaggatctcagcttggcagtcgagtgggtggcgaccttttaaaggaatgggacccacccggagttc

SEQ ID NO: 611 - DNA, 1079 bp, synthetic construct
  source 1..1079: mol_type = other DNA
tcgagctccactaggccgaggaccctaaaccccgaagaaaggaaaggcctctcaccgtcctttcgccgccgccccgcgcttcctgatgagttcgtccagggagatgtccgccatcttgctccgccgagcaagccgaaagcagtcgagaccccgcgagcccgccccttcggccgctagggagcgacgaactacttccggcgtccgcggaccaactctcgcgacagccagctcaaagcaggcaagaaccggaaggggcggggacgttccccgtgagccttcgcggtgctggctgctcatctgcatacggaagttcggcacattatgaattatttattttcctcgagggaaaaaattaaatgaaaagcaacaaaatacattattaacaagtgagacaaacttcaatggaactggatcatgacctcaacagtcaactacgatagtcatcatacgcctaatgagaatagaattcattacctaggaaataaactaaaaacgtccttaatgatagggacttagggtgatagaagtgcaaagcatgactgtcaaatttttggagcaggttttctgacttcggtcggaaaacccctttcccttcttgtaatacaaaataataacaaccacagaggacatcgcaagtaaaatgtgtataacaaccccatctaaagaaccctatcatctttctactatctgtctacctaaatatgtatagtataaataaccctatatagcactctaagcaacttaagttaggtaacttagaaaactcttttttttttttgagactgagtctcactctgtcgcacccaggctggagtgcagtggcgtgatctcggctcactgcaacctccaccttctgggttcaagtgattctcccatctcagtctcccaagtagctgggattacaggcacgccaccatgccctgctacatttttttttttttagtagagatgaggtttcaccacattggccaggctgttctcgaactcctgacctcaggtgatccgcccaccttggcctcatgaagtgctgggattacaggtgtgagccactgtacccagccagaaaactcttaaaaaac

SEQ ID NO: 612 - DNA, 969 bp, synthetic construct
  source 1..969: mol_type = other DNA
tcgagctccactaggccgaggaccctaaaccccgaagaaaggaaaggcctctcaccgtcctttcgccgccgccccgcgcttcctgatgagttcgtccagggagatgtccgccatcttgctccgccgagcaagccgaaagcagtcgagaccccgcgagcccgccccttcggccgctagggagcgacgaactacttccggcgtccgcggaccaactctcgcgacagccagctcaaagcaggcaagaaccggaaggggcggggacgttccccgtgagccttcgcggtgctggctgctcatctgcatacggaagttcggcacattatgaattatttattttcctcgagggaaaaaattaaatgaaaagcaacaaaatacattattaacaagtgagacaaacttcaatggaactggatcatgacctcaacagtcaactacgatagtcatcatacgcctaatgagaatagaattcattacctaggaaataaactaaaaacgtccttaatgatagggacttagggtgatagaagtgcaaagcatgactgtcaaatttttggagcaggttttctgacttcggtcggaaaacccctctgaattttcttgcagttgaacaacagaggctttttttgtgtgtgtgggggtgcttggttttgggaggttgaagagtacttgttcgcaaactctctaaatgagagatggggaagtgtcttaccagctgattcgcgagagcacctgcaagtttacctgttttagtgatttgcgtttatgaaagttggagttgctgattttgtgatctctacttttaaggtaaaagcagggcggtgttgacttttcttgccagttggctgtcctgttttctttctcgcactgttttctttttgagacgaagtctgtcgctcaggctggagtgcactggcgtgatctcggctcgctgcaaactttgccgaacccctgtttagcgatttccgtttg

SEQ ID NO: 613 - DNA, 1087 bp, synthetic construct
  source 1..1087: mol_type = other DNA
tcgagctccactaggccgaggaccctaaaccccgaagaaaggaaaggcctctcaccgtcctttcgccgccgccccgcgcttcctgatgagttcgtccagggagatgtccgccatcttgctccgccgagcaagccgaaagcagtcgagaccccgcgagcccgccccttcggccgctagggagcgacgaactacttccggcgtccgcggaccaactctcgcgacagccagctcaaagcaggcaagaaccggaaggggcggggacgttccccgtgagccttcgcggtgctggctgctcatctgcatacggaagttcggcacattatgaattatttattttcctcgagggaaaaaattaaatgaaaagcaacaaaatacattattaacaagtgagacaaacttcaatggaactggatcatgacctcaacagtcaactacgatagtcatcatacgcctaatgagaatagaattcattacctaggaaataaactaaaaacgtccttaatgatagggacttagggtgatagaagtgcaaagcatgactgtcaaatttttggagcaggttttctgacttcggtcggaaaacccctatatgtggtaatccaacaatagaaattatttttaagtttgtgtgttcctttttctgttcaatggtgcttttgatattgttgtaaagcagtgactagcagattctgtgtggtaaaagcactgaaccctgtttagttcttttctccctaccttattggtaattatttctgtgtatatatgttccaaagaaatgcggcttgtatattcatgcttttcaactttttgtgatagacagttgatacacaagtagtacctcctccgggatcttcttagtcaagactgtttggtagatgcatgttttttgttacttgtaatgtacagtattcagttcattttctttttgcagcactgtccggttgaaacacaacgcgaggatcgggcgtggtggctcacgcctgtaatcccagcactttgggaggccgaggcaggacaatcaagaccaatcctggtcatcaaggcaggagaatcaagaccatcgaggtcaggagatcaagaccatcct

SEQ ID NO: 614 - DNA, 1085 bp, synthetic construct
  source 1..1085: mol_type = other DNA
tcgagctccactaggccgaggaccctaaaccccgaagaaaggaaaggcctctcaccgtcctttcgccgccgccccgcgcttcctgatgagttcgtccagggagatgtccgccatcttgctccgccgagcaagccgaaagcagtcgagaccccgcgagcccgccccttcggccgctagggagcgacgaactacttccggcgtccgcggaccaactctcgcgacagccagctcaaagcaggcaagaaccggaaggggcggggacgttccccgtgagccttcgcggtgctggctgctcatctgcatacggaagttcggcacattatgaattatttattttcctcgagggaaaaaattaaatgaaaagcaacaaaatacattattaacaagtgagacaaacttcaatggaactggatcatgacctcaacagtcaactacgatagtcatcatacgcctaatgagaatagaattcattacctaggaaataaactaaaaacgtccttaatgatagggacttagggtgatagaagtgcaaagcatgactgtcaaatttttggagcaggttttctgacttcggtcggaaaacccctacatcaggttgtttttctgtttttacatcaggttgtttttctgtttggttttttttttacaccacgtttatacgccggtgcacggtttaccactgaaaacacctttcatctacaggtgatatcttttaacacaaataaaatgtagtagtcctaggagacggaatagaaggaggtggggcctaggcagattcatctctgcggtgcattttgcctctggccctcgggccctagtttgcgatctttcccatcttgcctctgcttccctctgcacaatcctgagtattgcagtaccttacacttaaggaaatttcgtcttgccaaagttgatccatttcagctccgaaacataacaggaactagtgcaacgataaacgtatgaggaacttgcaataagagtgacagaatcctttgaatcaaaaaaaaaaaaagccaccacttaatgagtatctaccatatgtcaagggcttcaccaatatttcattgaaatattccagacca

SEQ ID NO: 615 - DNA, 1087 bp, synthetic construct
  source 1..1087: mol_type = other DNA
tcgagctccactaggccgaggaccctaaaccccgaagaaaggaaaggcctctcaccgtcctttcgccgccgccccgcgcttcctgatgagttcgtccagggagatgtccgccatcttgctccgccgagcaagccgaaagcagtcgagaccccgcgagcccgccccttcggccgctagggagcgacgaactacttccggcgtccgcggaccaactctcgcgacagccagctcaaagcaggcaagaaccggaaggggcggggacgttccccgtgagccttcgcggtgctggctgctcatctgcatacggaagttcggcacattatgaattatttattttcctcgagggaaaaaattaaatgaaaagcaacaaaatacattattaacaagtgagacaaacttcaatggaactggatcatgacctcaacagtcaactacgatagtcatcatacgcctaatgagaatagaattcattacctaggaaataaactaaaaacgtccttaatgatagggacttagggtgatagaagtgcaaagcatgactgtcaaatttttggagcaggttttctgacttcggtcggaaaacccctcttatgatgtttgttgccaatgatagattgttttcactgtgcaaaaattatgggtagttttggtggtcttgatgcagttgtaagcttggggtatgaaggtttgggccacgcctgggcgcttccggctgcgccggatgctgtttcctttccgctcccaggggcgttgggaacggttgtaggacgtggctctttattcgtgagttttccatttacctccgctgaacctagagcttcagacgccctatggcgtccgcctcgacccaaccggcggccttgagcgctgagcaagcaaagggtgagaatcgtcctagtcaaggcataggctgctggcctggggtagtcaaggcatgggctgctggtctggggaggatgcgggcggaggatgtggggcgacaaacctggctacgtccgccgggaaaatggggtaggggacgccgggtaccgtccttctaagtggggcgcttgcccccaagacttgggatcttattgggttacctaca

SEQ ID NO: 616 - DNA, 1085 bp, synthetic construct
  source 1..1085: mol_type = other DNA
tcgagctccactaggccgaggaccctaaaccccgaagaaaggaaaggcctctcaccgtcctttcgccgccgccccgcgcttcctgatgagttcgtccagggagatgtccgccatcttgctccgccgagcaagccgaaagcagtcgagaccccgcgagcccgccccttcggccgctagggagcgacgaactacttccggcgtccgcggaccaactctcgcgacagccagctcaaagcaggcaagaaccggaaggggcggggacgttccccgtgagccttcgcggtgctggctgctcatctgcatacggaagttcggcacattatgaattatttattttcctcgagggaaaaaattaaatgaaaagcaacaaaatacattattaacaagtgagacaaacttcaatggaactggatcatgacctcaacagtcaactacgatagtcatcatacgcctaatgagaatagaattcattacctaggaaataaactaaaaacgtccttaatgatagggacttagggtgatagaagtgcaaagcatgactgtcaaatttttggagcaggttttctgacttcggtcggaaaaccccttctttactgttatatgttaggcgaaatattacgcgtttggagtaagtggtgctttttgtaactgaaaagagattctgtgtgtgtttttttttttttagaggctgcatagttatttgtatgaaccgcaggtgacctaattagcaaggtaattcagacctgtatcctagcacttaagaagtggaagtgggataaccctgcgtgttctcgtgtgggaggctagcttaagcaacaaagcaggaaggccccaccaacaaaagaatttaaaaattatacgtgcgtggtggcgcgcgtatgaggaaattatttggcaactgtgttacagtatagcagcaaatggaatagacctagtccctgactttaggagacctgcctcagccccccgaatggctgggactacaggcgtgcgcctccgcgcccagctaatttttgcatttttggtagagacgggttcaccatgttggccaggatggtctccatctcttcatctggtgatccgcc

SEQ ID NO: 617 - DNA, 1087 bp, synthetic construct
  source 1..1087: mol_type = other DNA
tcgagctccactaggccgaggaccctaaaccccgaagaaaggaaaggcctctcaccgtcctttcgccgccgccccgcgcttcctgatgagttcgtccagggagatgtccgccatcttgctccgccgagcaagccgaaagcagtcgagaccccgcgagcccgccccttcggccgctagggagcgacgaactacttccggcgtccgcggaccaactctcgcgacagccagctcaaagcaggcaagaaccggaaggggcggggacgttccccgtgagccttcgcggtgctggctgctcatctgcatacggaagttcggcacattatgaattatttattttcctcgagggaaaaaattaaatgaaaagcaacaaaatacattattaacaagtgagacaaacttcaatggaactggatcatgacctcaacagtcaactacgatagtcatcatacgcctaatgagaatagaattcattacctaggaaataaactaaaaacgtccttaatgatagggacttagggtgatagaagtgcaaagcatgactgtcaaatttttggagcaggttttctgacttcggtcggaaaacccctaccttattcacgcctaaaaagtagactgactgtggggtggtcgtgttttttgtttcttgttggtaggtggtgaatgcgtttttttcgttgttttctccgttactcaggctgccagttgcttggcagtcttgtcgctggctgtggacgctctgcacttcatcaccgtccccagctgcgctttgagccggtctaaggttgcccacagtattgacgttgggacccacgaaactggcaatttccatgtgtgcggccttacccagttctcccaaacttctgcgtataaccgcttctctgtgcttcagaaagataagtccggccccggcctcacacagcagctcagttcgtgacagcgtttaatatgtaaaatggagcaaataatttatagggcgttgggagagttaaagagactaattcatttacgtgttaaatacagggaatggcttttgcattgatataaccccagcctccagcatgcgccagacctgacgtaggtgttcggc

SEQ ID NO: 618 - DNA, 1087 bp, synthetic construct
  source 1..1087: mol_type = other DNA
tcgagctccactaggccgaggaccctaaaccccgaagaaaggaaaggcctctcaccgtcctttcgccgccgccccgcgcttcctgatgagttcgtccagggagatgtccgccatcttgctccgccgagcaagccgaaagcagtcgagaccccgcgagcccgccccttcggccgctagggagcgacgaactacttccggcgtccgcggaccaactctcgcgacagccagctcaaagcaggcaagaaccggaaggggcggggacgttccccgtgagccttcgcggtgctggctgctcatctgcatacggaagttcggcacattatgaattatttattttcctcgagggaaaaaattaaatgaaaagcaacaaaatacattattaacaagtgagacaaacttcaatggaactggatcatgacctcaacagtcaactacgatagtcatcatacgcctaatgagaatagaattcattacctaggaaataaactaaaaacgtccttaatgatagggacttagggtgatagaagtgcaaagcatgactgtcaaatttttggagcaggttttctgacttcggtcggaaaaccccttttgacccattacccatctaagttagatgcttttttaaatgttttttaatttttaaatttttaatttttttcattatttattttttatttttgagacggatctcggctcactgtaacctccacctcccgggttcaagcgattctcctgactcagcctcccgagtagctgggattacaggcgcgcgccaccatgcccggctaatttttctatttttagtaaagacggggtttcgccatgttgaccagggtggtcttgaactcctgacgtcaggtgatcctcctgcctcgtgctgggattgcaggcgtgagccaccgctcccggcccttagatgctttttaatcagcaagtacgcaatgctttcctgacaggaatgtcaagtccgtcaggaaatccacataagggtgttaagcaggcaaagtaccacatacagattaaaatcaaaagcactgtcaacgcttatttaatttatacagtagaccctaacttttctaattttgtg

SEQ ID NO: 619 - DNA, 1087 bp, synthetic construct
  source 1..1087: mol_type = other DNA
tcgagctccactaggccgaggaccctaaaccccgaagaaaggaaaggcctctcaccgtcctttcgccgccgccccgcgcttcctgatgagttcgtccagggagatgtccgccatcttgctccgccgagcaagccgaaagcagtcgagaccccgcgagcccgccccttcggccgctagggagcgacgaactacttccggcgtccgcggaccaactctcgcgacagccagctcaaagcaggcaagaaccggaaggggcggggacgttccccgtgagccttcgcggtgctggctgctcatctgcatacggaagttcggcacattatgaattatttattttcctcgagggaaaaaattaaatgaaaagcaacaaaatacattattaacaagtgagacaaacttcaatggaactggatcatgacctcaacagtcaactacgatagtcatcatacgcctaatgagaatagaattcattacctaggaaataaactaaaaacgtccttaatgatagggacttagggtgatagaagtgcaaagcatgactgtcaaatttttggagcaggttttctgacttcggtcggaaaacccctgtttacttggttttaaaaatagcttgcactagcgataccgcgaatatggttattaggtttgttaggcacagtcgtgtcttactatagaaaaataacgtagtgttcattttgctgcctgtatgtgttaatttgtccttattgcgccattgttcttgttaagtcttctgtaaggagttgcgggtttcaaactgtcagtctgagagcataagctcacttttcagtcagttgaattgaatgttacattcgattggttctggatattgatattacccaaggcttgtcctgtttgtaagtcttttcctacacctgacaatatgattatgtttacaatgtccctagaactctgggtgtatcgttcccactgaataaaatttgatctctaagttgacctataaatttaagtaccaaaaaactggtttgtaagattttggaaggcagaggcagggaagagaccaacgtggtctacatataaagtaccaggtacatataaagtaccaggt

SEQ ID NO: 620 - DNA, 1083 bp, synthetic construct
  source 1..1083: mol_type = other DNA
tcgagctccactaggccgaggaccctaaaccccgaagaaaggaaaggcctctcaccgtcctttcgccgccgccccgcgcttcctgatgagttcgtccagggagatgtccgccatcttgctccgccgagcaagccgaaagcagtcgagaccccgcgagcccgccccttcggccgctagggagcgacgaactacttccggcgtccgcggaccaactctcgcgacagccagctcaaagcaggcaagaaccggaaggggcggggacgttccccgtgagccttcgcggtgctggctgctcatctgcatacggaagttcggcacattatgaattatttattttcctcgagggaaaaaattaaatgaaaagcaacaaaatacattattaacaagtgagacaaacttcaatggaactggatcatgacctcaacagtcaactacgatagtcatcatacgcctaatgagaatagaattcattacctaggaaataaactaaaaacgtccttaatgatagggacttagggtgatagaagtgcaaagcatgactgtcaaatttttggagcaggttttctgacttcggtcggaaaacccctatttttgtggtgctaaaagttagattgcattccgcccttctcacgtctctttacgtgttgtttgcgaggcgtggcctcggaggtaaatggtctccttttacctcagataagcttacctttgctctgtgagtaagaatgtagctacacttccaaatttagctattgtcctttgcggtccaaatgaaaatattaccttccgatctaacaatgttaaactagtcccaggcccttctatcgattgccagaatagactagactactacacagacacaccctctcaaatcaggccagctcctgcaacctgcacctacagtttgtcccctgggacaaatgaaaggacaggccctctttcccccccccccccaaatcagagcacacacagatcttggggtctggggcagaaatttcgttcatggaaaaaacaaacaaacaaacaaacacgatcaaaggaagctcgttccctttggcctcagggtttcttagacgccgtgttccc

SEQ ID NO: 621 - DNA, 1084 bp, synthetic construct
  source 1..1084: mol_type = other DNA
tcgagctccactaggccgaggaccctaaaccccgaagaaaggaaaggcctctcaccgtcctttcgccgccgccccgcgcttcctgatgagttcgtccagggagatgtccgccatcttgctccgccgagcaagccgaaagcagtcgagaccccgcgagcccgccccttcggccgctagggagcgacgaactacttccggcgtccgcggaccaactctcgcgacagccagctcaaagcaggcaagaaccggaaggggcggggacgttccccgtgagccttcgcggtgctggctgctcatctgcatacggaagttcggcacattatgaattatttattttcctcgagggaaaaaattaaatgaaaagcaacaaaatacattattaacaagtgagacaaacttcaatggaactggatcatgacctcaacagtcaactacgatagtcatcatacgcctaatgagaatagaattcattacctaggaaataaactaaaaacgtccttaatgatagggacttagggtgatagaagtgcaaagcatgactgtcaaatttttggagcaggttttctgacttcggtcggaaaacccctataactggtaaccaaaagcagattactttcccccttgtggtcttcgcgtttgcggacgggagagaactttcggccattttccttttagaaatttaacttcttgaaggccaccaggtgacccttacttccctctcacctttccttctacctgtactttctctattaaaaagcctgcagaagtacccttgacaaattgccaaaaatgacacctaaaaaaaaaaaaaggaaaaacgacaccttaggtaattataggttgtaagaaaaagatttgacctcttggagtttttatttcttaataccaaaggacacccaaggaacgtatctctcaaaattgggtttcaaacctcagccgtttccttcttagttccagtgcttaacacgcaacagacctgcacaccactacactgcatacgagttttaaagttaataaatcagtcacccctccatagtcttctacctacttgaagacagaaacggctgctaggaagcaattcttc

SEQ ID NO: 622 - DNA, 1087 bp, synthetic construct
  source 1..1087: mol_type = other DNA
tcgagctccactaggccgaggaccctaaaccccgaagaaaggaaaggcctctcaccgtcctttcgccgccgccccgcgcttcctgatgagttcgtccagggagatgtccgccatcttgctccgccgagcaagccgaaagcagtcgagaccccgcgagcccgccccttcggccgctagggagcgacgaactacttccggcgtccgcggaccaactctcgcgacagccagctcaaagcaggcaagaaccggaaggggcggggacgttccccgtgagccttcgcggtgctggctgctcatctgcatacggaagttcggcacattatgaattatttattttcctcgagggaaaaaattaaatgaaaagcaacaaaatacattattaacaagtgagacaaacttcaatggaactggatcatgacctcaacagtcaactacgatagtcatcatacgcctaatgagaatagaattcattacctaggaaataaactaaaaacgtccttaatgatagggacttagggtgatagaagtgcaaagcatgactgtcaaatttttggagcaggttttctgacttcggtcggaaaacccctctggggaataagagtggtttaaagaaagaacaatttgagagatctgcttagatctaataaaacccaagtatagtttctttagacgtcttatatctcacgtaggacctcttatttcagactcactgcaagaacaagctaaagaactatatacagtcaggaacaaggtgagccatcgcggttctcagtcccatgatcttaagagtttttcctcttcccctcttccctggctgtcctggagctcactctgtagaccaggctggtctcaaactcagaaatccacttacctctgcctcccaagggctgggattaaaggcatgcaccaccattgcccggcagggtatgtggactatgctgtccttcaactcagagatcgtggtactttaaatctcattttccgaaagaaaagaaaagaaaggaaggggggaaataaagccagtatattttgcacccacaatctgaagttctacaaatattgttagaaaatgcaaaggacccaagtc

SEQ ID NO: 623 - DNA, 1087 bp, synthetic construct
  source 1..1087: mol_type = other DNA
tcgagctccactaggccgaggaccctaaaccccgaagaaaggaaaggcctctcaccgtcctttcgccgccgccccgcgcttcctgatgagttcgtccagggagatgtccgccatcttgctccgccgagcaagccgaaagcagtcgagaccccgcgagcccgccccttcggccgctagggagcgacgaactacttccggcgtccgcggaccaactctcgcgacagccagctcaaagcaggcaagaaccggaaggggcggggacgttccccgtgagccttcgcggtgctggctgctcatctgcatacggaagttcggcacattatgaattatttattttcctcgagggaaaaaattaaatgaaaagcaacaaaatacattattaacaagtgagacaaacttcaatggaactggatcatgacctcaacagtcaactacgatagtcatcatacgcctaatgagaatagaattcattacctaggaaataaactaaaaacgtccttaatgatagggacttagggtgatagaagtgcaaagcatgactgtcaaatttttggagcaggttttctgacttcggtcggaaaacccctctcggtttatcttaaagggttttaaatatagaaagcttccttagtcttatgggtgagagtgctgtttaagccttacctaggtatgtctttgaacatttattacagattgttatttgtgactatgaccactcaggtgttctgttcttgtgaatttagacacactcagaaaggctacacactcaaagaccacaccaaagtgaagtactatctgggccgtgaaactggtcacatatcagttattttgcagtaaaacaaggaagtcaatcatactgcttcagtgggtcagggagtcaagaatgcacagtacaagagctggtgagattcctcagcaggtaagagcactgaatgctcttccaaagattctgagttcaaatcccagcaaccacgtggtggatttgaacaaaggatgaaaacaaccatccataaccagatctgatgccctcttctggagtgtcaaaagacagctatggtgtacttacataaataaataagtaaaaaca

SEQ ID NO: 624 - DNA, 1087 bp, synthetic construct
  source 1..1087: mol_type = other DNA
tcgagctccactaggccgaggaccctaaaccccgaagaaaggaaaggcctctcaccgtcctttcgccgccgccccgcgcttcctgatgagttcgtccagggagatgtccgccatcttgctccgccgagcaagccgaaagcagtcgagaccccgcgagcccgccccttcggccgctagggagcgacgaactacttccggcgtccgcggaccaactctcgcgacagccagctcaaagcaggcaagaaccggaaggggcggggacgttccccgtgagccttcgcggtgctggctgctcatctgcatacggaagttcggcacattatgaattatttattttcctcgagggaaaaaattaaatgaaaagcaacaaaatacattattaacaagtgagacaaacttcaatggaactggatcatgacctcaacagtcaactacgatagtcatcatacgcctaatgagaatagaattcattacctaggaaataaactaaaaacgtccttaatgatagggacttagggtgatagaagtgcaaagcatgactgtcaaatttttggagcaggttttctgacttcggtcggaaaacccctccacattttgtgtttaaaaatagaaatatttaagtgagatcagtttaaatctgctttatctagggtgtctaactgcttgcatctttttaacttttccttatttgtgagaaggtctgtaaaacttattatatgttagtacactgtagctgtcttcagacactccagaagagggattcagatcaccttacagatggttttgagccaccatgtggttgctgggatttgaactcaggacctttagaaaagtagttgggtgctcttacccgctgagccatctcaccagccctttttttttcttttttccagttcgggtttctctgtgtgtagccctggctgtcctggaactcattctgtagaccgggctggcctcgaactcagaaatctgcctgcctctgcctcccaagtgctgggattaaaggaatgtgccttcattgcccggctctagggctttttgttgttgtttgtttgtttgtttgtttgtttgcttttgtggatggcct

SEQ ID NO: 625 - DNA, 1087 bp, synthetic construct
  source 1..1087: mol_type = other DNA
tcgagctccactaggccgaggaccctaaaccccgaagaaaggaaaggcctctcaccgtcctttcgccgccgccccgcgcttcctgatgagttcgtccagggagatgtccgccatcttgctccgccgagcaagccgaaagcagtcgagaccccgcgagcccgccccttcggccgctagggagcgacgaactacttccggcgtccgcggaccaactctcgcgacagccagctcaaagcaggcaagaaccggaaggggcggggacgttccccgtgagccttcgcggtgctggctgctcatctgcatacggaagttcggcacattatgaattatttattttcctcgagggaaaaaattaaatgaaaagcaacaaaatacattattaacaagtgagacaaacttcaatggaactggatcatgacctcaacagtcaactacgatagtcatcatacgcctaatgagaatagaattcattacctaggaaataaactaaaaacgtccttaatgatagggacttagggtgatagaagtgcaaagcatgactgtcaaatttttggagcaggttttctgacttcggtcggaaaacccctaaaaccagtaagggagaaaggtcaagtaacatataaaggaaggcctatcagaattacaccagacttttcaccagagactatgaaagccagaagagcctggacagatgttatacagacactaagagaacacaaatgccagcccaggctactatacctggccaaactctcaattaccatagatggagaaaccaaagtattccacgacaaaaacaaattcacacaatatctttccacgaatccagcccttcaaaggataatgacagaaaagaagcaatacaaggacggaaatcacgccctagaacaaccaagaaactaatcattcaacaaaccaaaaagaagacagccacaagaacagaatgccaactctaacaacaaaaataaaaggaagcaacaattacttttccttaatatctcttaatatcaatggactcaattccccaataaaaagacatagactaacagactggctacacaaacaggacccaacattctgctgctta

SEQ ID NO: 626 - DNA, 1087 bp, synthetic construct
  source 1..1087: mol_type = other DNA
tcgagctccactaggccgaggaccctaaaccccgaagaaaggaaaggcctctcaccgtcctttcgccgccgccccgcgcttcctgatgagttcgtccagggagatgtccgccatcttgctccgccgagcaagccgaaagcagtcgagaccccgcgagcccgccccttcggccgctagggagcgacgaactacttccggcgtccgcggaccaactctcgcgacagccagctcaaagcaggcaagaaccggaaggggcggggacgttccccgtgagccttcgcggtgctggctgctcatctgcatacggaagttcggcacattatgaattatttattttcctcgagggaaaaaattaaatgaaaagcaacaaaatacattattaacaagtgagacaaacttcaatggaactggatcatgacctcaacagtcaactacgatagtcatcatacgcctaatgagaatagaattcattacctaggaaataaactaaaaacgtccttaatgatagggacttagggtgatagaagtgcaaagcatgactgtcaaatttttggagcaggttttctgacttcggtcggaaaacccctcccaatttcactggtctacaatgaaagcaaaacagttctcttccccgctccccggtgtgtgagaggggctttgatccttctctggtttcctaggaaacgcgtatgtgctagagccacgctctgagacttccgcctcgtgcggtcccgcttcctttctgcctcctctggcctgcatccgtgggggaggtggctggctgcagggttctccggatctcttctgtgttcccactactcaagcaccgagtggcgttctatggcgtccgcctcggctcagcccgcggccctgagcgcggagcaggccaagggtgaggaaagagcctagtctgggtgtgggccgtcttctggggggagggcgcgatactattctttgcctctccaagtggggcccttgcccattagggcgaagggttgggaggacaagcttatcgggttgcttgcaggcctcggcccactaattccctgcctcttccctcctctgggctcgcccgccgtcctccgcg

SEQ ID NO: 627 - DNA, 1087 bp, synthetic construct
  source 1..1087: mol_type = other DNA
tcgagctccactaggccgaggaccctaaaccccgaagaaaggaaaggcctctcaccgtcctttcgccgccgccccgcgcttcctgatgagttcgtccagggagatgtccgccatcttgctccgccgagcaagccgaaagcagtcgagaccccgcgagcccgccccttcggccgctagggagcgacgaactacttccggcgtccgcggaccaactctcgcgacagccagctcaaagcaggcaagaaccggaaggggcggggacgttccccgtgagccttcgcggtgctggctgctcatctgcatacggaagttcggcacattatgaattatttattttcctcgagggaaaaaattaaatgaaaagcaacaaaatacattattaacaagtgagacaaacttcaatggaactggatcatgacctcaacagtcaactacgatagtcatcatacgcctaatgagaatagaattcattacctaggaaataaactaaaaacgtccttaatgatagggacttagggtgatagaagtgcaaagcatgactgtcaaatttttggagcaggttttctgacttcggtcggaaaacccctgaatttgttaaattacaggaggaagcttttttagttcattttacaaatactttcttgttaggtagataataccttctaaggttattatctggatcttctaagtctttttatcgctagcaagtctaagtttctggactttggaattagaagttaatgtcgtaggcgggcatggtggtccacgcctttaatcccagagtttgggaggcagacgcaggtggttttctgagttcgaggccatcctgctcttcaatgttagttccaggacagccagggttatacaaagaaaccctgtctcgagaaacaaaacaaacaaaaaaagagtagctgagtgctctgagttgtctctccagccccttagctatttattttcatttaaattatttttgttttattcgcttgtgtgcctgagtttgaatttcccgggattaacagttgaagactagggctggtgagatggctcagcggttaagattgccgactgctcttccaaaggtcctgag

SEQ ID NO: 628 - DNA, 1087 bp, synthetic construct
  source 1..1087: mol_type = other DNA
tcgagctccactaggccgaggaccctaaaccccgaagaaaggaaaggcctctcaccgtcctttcgccgccgccccgcgcttcctgatgagttcgtccagggagatgtccgccatcttgctccgccgagcaagccgaaagcagtcgagaccccgcgagcccgccccttcggccgctagggagcgacgaactacttccggcgtccgcggaccaactctcgcgacagccagctcaaagcaggcaagaaccggaaggggcggggacgttccccgtgagccttcgcggtgctggctgctcatctgcatacggaagttcggcacattatgaattatttattttcctcgagggaaaaaattaaatgaaaagcaacaaaatacattattaacaagtgagacaaacttcaatggaactggatcatgacctcaacagtcaactacgatagtcatcatacgcctaatgagaatagaattcattacctaggaaataaactaaaaacgtccttaatgatagggacttagggtgatagaagtgcaaagcatgactgtcaaatttttggagcaggttttctgacttcggtcggaaaacccctaccccctaattctacaagaatagaaagcttagcagctcctctgaatggttgctctcaggtgctagtggttgcaagtcgtatgttgatgcctgcctttgccctacctggtgtgtgagcgtgagcgcgccccacctctccagcctctctcttactgtttttcagacaagatgggactgttgttctcctactgctatgtacctcaatttcaattgatcatgcctggacataactgcccatgttgtaaggtcgtctacgttgtaaggtcgtgctcagtttctgatgcctagactagtcacctttccgtttgcctcctgactgtgtaaatgaggcaaatgaaggtggtctcttaactgacatgttagtgtttgacctatgggatagtttctcattgttgagacagaatttctagaagctggtccgctgagcggctaagagcacttgctgatattgcaaaggatctacctgggtttggttctcagcactcacatggaagttcacat

SEQ ID NO: 629 - DNA, 654 bp, synthetic construct
  source 1..654: mol_type = other DNA
tcgagctccactaggccgaggaccctaaaccccgaagaaaggaaaggcctctcaccgtcctttcgccgccgccccgcgcttcctgatgagttcgtccagggagatgtccgccatcttgctccgccgagcaagccgaaagcagtcgagaccccgcgagcccgccccttcggccgctagggagcgacgaactacttccggcgtccgcggaccaactctcgcgacagccagctcaaagcaggcaagaaccggaaggggcggggacgttccccgtgagccttcgcggtgctggctgctcatctgcatacggaagttcggcacattatgaattatttattttcctcgagggaaaaaattaaatgaaaagcaacaaaatacattattaacaagtgagacaaacttcaatggaactggatcatgacctcaacagtcaactacgatagtcatcatacgcctaatgagaatagaattcattacctaggaaataaactaaaaacgtccttaatgatagggacttagggtgatagaagtgcaaagcatgactgtcaaatttttggagcaggttttctgacttcggtcggaaaaccccttgtagttcctgcaatttaattttcgtttaaaactttattttattctttaacttaaaaaaaatatata

SEQ ID NO: 630 - DNA, 1087 bp, synthetic construct
  source 1..1087: mol_type = other DNA
gacaagagaaggactgaactgggggagtgagggaagaatgcgagagtgagactcagagagtaaaggggagggaaaaaaaagaagagagaaagggcgaggaagggggcgaccgcaggagggagacagacctggagtccactcggaggcctggagccgcacaaagcgccaggtcagcggtcccggctgggtgagaccagcaggcggctctagcgcgcgggagctgggcgaggctccgggacgacctcaccaatggagactgcagtatttagcatgccccacccatctgcaaggcattctggatagtgtcaaaacagccggaaatcaagtccgtttatctcaaactttagcattttgggaataaatgatatttgctatgctggttaaattagattttagttaaatttcctgctgaagctctagtacgataagcaacttgacctaagtgtaaagttgagacttccttcaggtttatatagcttgtgcgccgcttgggtacctcgaatgatagggacttagggtgatagaagtgcaaagcatgactgtcaaatttttggagcaggttttctgacttcggtcggaaaacccctactttctggagtttcaaaaacagactgtacgccaagggtcatatctttttttgtattggtttgtgtcttggttggtgtcttaggtgttaatcctacagtggagggtttatgggaataggaagtaacatgtcgcctgcatgtcataggagaaaaagcgagcatcagccgtatcggctttgtaacacaaattagctatcgtgaagtccgctcagctcttccctttctaccctggctgctttttgcagggattggtccgtggtctccagtctcttgggttctcaccctgtgtgaaaatcttcgtgtttttccctaccccccagtcacctcttacacagcctctgcttccaagcgcagcccccacaggagtttgtaggatttctgtgctagcggggaatgtgttctcacctcatagagccaggtagaaattatgcagatgggcagttctctgggaagaaagcagggcctttggggctctcagtgtccccgttgggttgtagaca

SEQ ID NO: 631 - DNA, 1087 bp, synthetic construct
  source 1..1087: mol_type = other DNA
gacaagagaaggactgaactgggggagtgagggaagaatgcgagagtgagactcagagagtaaaggggagggaaaaaaaagaagagagaaagggcgaggaagggggcgaccgcaggagggagacagacctggagtccactcggaggcctggagccgcacaaagcgccaggtcagcggtcccggctgggtgagaccagcaggcggctctagcgcgcgggagctgggcgaggctccgggacgacctcaccaatggagactgcagtatttagcatgccccacccatctgcaaggcattctggatagtgtcaaaacagccggaaatcaagtccgtttatctcaaactttagcattttgggaataaatgatatttgctatgctggttaaattagattttagttaaatttcctgctgaagctctagtacgataagcaacttgacctaagtgtaaagttgagacttccttcaggtttatatagcttgtgcgccgcttgggtacctcgaatgatagggacttagggtgatagaagtgcaaagcatgactgtcaaatttttggagcaggttttctgacttcggtcggaaaacccctactttctggagtttctaaaagtagactgtacgctaagggtcatatctttttttgttttggtttgtgtcttggttggcgtcttaaatgttaatcctacagtggagggctggcgaataggaagtaacatgtcgcctgcacgccataggagaaaaagcgagcatcagccgtatcggctttgtaacacaaattagctatcgtgaagtccgctcagctcttccctttctaccctggctgctttttgcagggattggtccgtggtctccagtctcttgggttctcaccctgtgtgaaaatcttcctgtttttccctaccccccaagtcacctcttacacagcctctgcttccaagcgcagcccccacaggagtttgtaggatttctgtgctagcggggagtgtgttctcacctcatagagccaggtagaaactacgcagatgggtgctgttctccaggaagaaagcagggcctttggggctctcagtgtccccgttgggttgtaga

SEQ ID NO: 632 - DNA, 1087 bp, synthetic construct
  source 1..1087: mol_type = other DNA
gacaagagaaggactgaactgggggagtgagggaagaatgcgagagtgagactcagagagtaaaggggagggaaaaaaaagaagagagaaagggcgaggaagggggcgaccgcaggagggagacagacctggagtccactcggaggcctggagccgcacaaagcgccaggtcagcggtcccggctgggtgagaccagcaggcggctctagcgcgcgggagctgggcgaggctccgggacgacctcaccaatggagactgcagtatttagcatgccccacccatctgcaaggcattctggatagtgtcaaaacagccggaaatcaagtccgtttatctcaaactttagcattttgggaataaatgatatttgctatgctggttaaattagattttagttaaatttcctgctgaagctctagtacgataagcaacttgacctaagtgtaaagttgagacttccttcaggtttatatagcttgtgcgccgcttgggtacctcgaatgatagggacttagggtgatagaagtgcaaagcatgactgtcaaatttttggagcaggttttctgacttcggtcggaaaacccctactttctggagtttcaaaaacagaccgtacgccaagggtcatgtcttttttcgtattggtttgtgtcttagttgttaatcctacagtggaggcctggggaataagaagtaacatgtggcctgcacgccataggagaaaaagcgagcatcagccgtatcggctttgtaacacaaattagctatcgtgaagtccgctcagctcttccatttctaccctggctgctttttgcagggattggtccgtggtctccagtctcttgggttctcaccctgtgtgaaaatcttcgtgtttttccctaccccccaagtcacctcttacacagcctctgcttccaagcgcagcccccacaggagtttgtaggatttctgtgctagcggggagtgtgttctcacctcatagagccaggtagaaattatgcagatgggcgctgttctctgggaagaaagcagggcctttggggctctcagtgtccccgttgggttgtagacataacactctta

SEQ ID NO: 633 - DNA, 891 bp, synthetic construct
  source 1..891: mol_type = other DNA
gacaagagaaggactgaactgggggagtgagggaagaatgcgagagtgagactcagagagtaaaggggagggaaaaaaaagaagagagaaagggcgaggaagggggcgaccgcaggagggagacagacctggagtccactcggaggcctggagccgcacaaagcgccaggtcagcggtcccggctgggtgagaccagcaggcggctctagcgcgcgggagctgggcgaggctccgggacgacctcaccaatggagactgcagtatttagcatgccccacccatctgcaaggcattctggatagtgtcaaaacagccggaaatcaagtccgtttatctcaaactttagcattttgggaataaatgatatttgctatgctggttaaattagattttagttaaatttcctgctgaagctctagtacgataagcaacttgacctaagtgtaaagttgagacttccttcaggtttatatagcttgtgcgccgcttgggtacctcgaatgatagggacttagggtgatagaagtgcaaagcatgactgtcaaatttttggagcaggttttctgacttcggtcggaaaacccctcctccggggatacaacgtgtttcctaaaagtagagggaggtaagagacggtagcacctgcggggcggcttgcacgccgagtgcctgtgacgcgccggcttaacttaactgcttccctgaagtaccttgaggttcctgatgtgcgggcggtagacggtaggcttatgcggcacgctgtcgtttccaccgtggctactgcgctttgggaaggccacgacctcctcctttggggaggtccttaggatctcagcttggcagtcgagtgggtggcgaccttttaaaggaatgggacccacccggagttc

SEQ ID NO: 634 - DNA, 1079 bp, synthetic construct
  source 1..1079: mol_type = other DNA
gacaagagaaggactgaactgggggagtgagggaagaatgcgagagtgagactcagagagtaaaggggagggaaaaaaaagaagagagaaagggcgaggaagggggcgaccgcaggagggagacagacctggagtccactcggaggcctggagccgcacaaagcgccaggtcagcggtcccggctgggtgagaccagcaggcggctctagcgcgcgggagctgggcgaggctccgggacgacctcaccaatggagactgcagtatttagcatgccccacccatctgcaaggcattctggatagtgtcaaaacagccggaaatcaagtccgtttatctcaaactttagcattttgggaataaatgatatttgctatgctggttaaattagattttagttaaatttcctgctgaagctctagtacgataagcaacttgacctaagtgtaaagttgagacttccttcaggtttatatagcttgtgcgccgcttgggtacctcgaatgatagggacttagggtgatagaagtgcaaagcatgactgtcaaatttttggagcaggttttctgacttcggtcggaaaacccctttcccttcttgtaatacaaaataataacaaccacagaggacatcgcaagtaaaatgtgtataacaaccccatctaaagaaccctatcatctttctactatctgtctacctaaatatgtatagtataaataaccctatatagcactctaagcaacttaagttaggtaacttagaaaactcttttttttttttgagactgagtctcactctgtcgcacccaggctggagtgcagtggcgtgatctcggctcactgcaacctccaccttctgggttcaagtgattctcccatctcagtctcccaagtagctgggattacaggcacgccaccatgccctgctacatttttttttttttagtagagatgaggtttcaccacattggccaggctgttctcgaactcctgacctcaggtgatccgcccaccttggcctcatgaagtgctgggattacaggtgtgagccactgtacccagccagaaaactcttaaaaaac

SEQ ID NO: 635 - DNA, 969 bp, synthetic construct
  source 1..969: mol_type = other DNA
gacaagagaaggactgaactgggggagtgagggaagaatgcgagagtgagactcagagagtaaaggggagggaaaaaaaagaagagagaaagggcgaggaagggggcgaccgcaggagggagacagacctggagtccactcggaggcctggagccgcacaaagcgccaggtcagcggtcccggctgggtgagaccagcaggcggctctagcgcgcgggagctgggcgaggctccgggacgacctcaccaatggagactgcagtatttagcatgccccacccatctgcaaggcattctggatagtgtcaaaacagccggaaatcaagtccgtttatctcaaactttagcattttgggaataaatgatatttgctatgctggttaaattagattttagttaaatttcctgctgaagctctagtacgataagcaacttgacctaagtgtaaagttgagacttccttcaggtttatatagcttgtgcgccgcttgggtacctcgaatgatagggacttagggtgatagaagtgcaaagcatgactgtcaaatttttggagcaggttttctgacttcggtcggaaaacccctctgaattttcttgcagttgaacaacagaggctttttttgtgtgtgtgggggtgcttggttttgggaggttgaagagtacttgttcgcaaactctctaaatgagagatggggaagtgtcttaccagctgattcgcgagagcacctgcaagtttacctgttttagtgatttgcgtttatgaaagttggagttgctgattttgtgatctctacttttaaggtaaaagcagggcggtgttgacttttcttgccagttggctgtcctgttttctttctcgcactgttttctttttgagacgaagtctgtcgctcaggctggagtgcactggcgtgatctcggctcgctgcaaactttgccgaacccctgtttagcgatttccgtttg

SEQ ID NO: 636 - DNA, 1087 bp, synthetic construct
  source 1..1087: mol_type = other DNA
gacaagagaaggactgaactgggggagtgagggaagaatgcgagagtgagactcagagagtaaaggggagggaaaaaaaagaagagagaaagggcgaggaagggggcgaccgcaggagggagacagacctggagtccactcggaggcctggagccgcacaaagcgccaggtcagcggtcccggctgggtgagaccagcaggcggctctagcgcgcgggagctgggcgaggctccgggacgacctcaccaatggagactgcagtatttagcatgccccacccatctgcaaggcattctggatagtgtcaaaacagccggaaatcaagtccgtttatctcaaactttagcattttgggaataaatgatatttgctatgctggttaaattagattttagttaaatttcctgctgaagctctagtacgataagcaacttgacctaagtgtaaagttgagacttccttcaggtttatatagcttgtgcgccgcttgggtacctcgaatgatagggacttagggtgatagaagtgcaaagcatgactgtcaaatttttggagcaggttttctgacttcggtcggaaaacccctatatgtggtaatccaacaatagaaattatttttaagtttgtgtgttcctttttctgttcaatggtgcttttgatattgttgtaaagcagtgactagcagattctgtgtggtaaaagcactgaaccctgtttagttcttttctccctaccttattggtaattatttctgtgtatatatgttccaaagaaatgcggcttgtatattcatgcttttcaactttttgtgatagacagttgatacacaagtagtacctcctccgggatcttcttagtcaagactgtttggtagatgcatgttttttgttacttgtaatgtacagtattcagttcattttctttttgcagcactgtccggttgaaacacaacgcgaggatcgggcgtggtggctcacgcctgtaatcccagcactttgggaggccgaggcaggacaatcaagaccaatcctggtcatcaaggcaggagaatcaagaccatcgaggtcaggagatcaagaccatcct

SEQ ID NO: 637 - DNA, 1085 bp, synthetic construct
  source 1..1085: mol_type = other DNA
gacaagagaaggactgaactgggggagtgagggaagaatgcgagagtgagactcagagagtaaaggggagggaaaaaaaagaagagagaaagggcgaggaagggggcgaccgcaggagggagacagacctggagtccactcggaggcctggagccgcacaaagcgccaggtcagcggtcccggctgggtgagaccagcaggcggctctagcgcgcgggagctgggcgaggctccgggacgacctcaccaatggagactgcagtatttagcatgccccacccatctgcaaggcattctggatagtgtcaaaacagccggaaatcaagtccgtttatctcaaactttagcattttgggaataaatgatatttgctatgctggttaaattagattttagttaaatttcctgctgaagctctagtacgataagcaacttgacctaagtgtaaagttgagacttccttcaggtttatatagcttgtgcgccgcttgggtacctcgaatgatagggacttagggtgatagaagtgcaaagcatgactgtcaaatttttggagcaggttttctgacttcggtcggaaaacccctacatcaggttgtttttctgtttttacatcaggttgtttttctgtttggttttttttttacaccacgtttatacgccggtgcacggtttaccactgaaaacacctttcatctacaggtgatatcttttaacacaaataaaatgtagtagtcctaggagacggaatagaaggaggtggggcctaggcagattcatctctgcggtgcattttgcctctggccctcgggccctagtttgcgatctttcccatcttgcctctgcttccctctgcacaatcctgagtattgcagtaccttacacttaaggaaatttcgtcttgccaaagttgatccatttcagctccgaaacataacaggaactagtgcaacgataaacgtatgaggaacttgcaataagagtgacagaatcctttgaatcaaaaaaaaaaaaagccaccacttaatgagtatctaccatatgtcaagggcttcaccaatatttcattgaaatattccagacca

SEQ ID NO: 638 - DNA, 1087 bp, synthetic construct
  source 1..1087: mol_type = other DNA
gacaagagaaggactgaactgggggagtgagggaagaatgcgagagtgagactcagagagtaaaggggagggaaaaaaaagaagagagaaagggcgaggaagggggcgaccgcaggagggagacagacctggagtccactcggaggcctggagccgcacaaagcgccaggtcagcggtcccggctgggtgagaccagcaggcggctctagcgcgcgggagctgggcgaggctccgggacgacctcaccaatggagactgcagtatttagcatgccccacccatctgcaaggcattctggatagtgtcaaaacagccggaaatcaagtccgtttatctcaaactttagcattttgggaataaatgatatttgctatgctggttaaattagattttagttaaatttcctgctgaagctctagtacgataagcaacttgacctaagtgtaaagttgagacttccttcaggtttatatagcttgtgcgccgcttgggtacctcgaatgatagggacttagggtgatagaagtgcaaagcatgactgtcaaatttttggagcaggttttctgacttcggtcggaaaacccctcttatgatgtttgttgccaatgatagattgttttcactgtgcaaaaattatgggtagttttggtggtcttgatgcagttgtaagcttggggtatgaaggtttgggccacgcctgggcgcttccggctgcgccggatgctgtttcctttccgctcccaggggcgttgggaacggttgtaggacgtggctctttattcgtgagttttccatttacctccgctgaacctagagcttcagacgccctatggcgtccgcctcgacccaaccggcggccttgagcgctgagcaagcaaagggtgagaatcgtcctagtcaaggcataggctgctggcctggggtagtcaaggcatgggctgctggtctggggaggatgcgggcggaggatgtggggcgacaaacctggctacgtccgccgggaaaatggggtaggggacgccgggtaccgtccttctaagtggggcgcttgcccccaagacttgggatcttattgggttacctaca

SEQ ID NO: 639 - DNA, 1085 bp, synthetic construct
  source 1..1085: mol_type = other DNA
gacaagagaaggactgaactgggggagtgagggaagaatgcgagagtgagactcagagagtaaaggggagggaaaaaaaagaagagagaaagggcgaggaagggggcgaccgcaggagggagacagacctggagtccactcggaggcctggagccgcacaaagcgccaggtcagcggtcccggctgggtgagaccagcaggcggctctagcgcgcgggagctgggcgaggctccgggacgacctcaccaatggagactgcagtatttagcatgccccacccatctgcaaggcattctggatagtgtcaaaacagccggaaatcaagtccgtttatctcaaactttagcattttgggaataaatgatatttgctatgctggttaaattagattttagttaaatttcctgctgaagctctagtacgataagcaacttgacctaagtgtaaagttgagacttccttcaggtttatatagcttgtgcgccgcttgggtacctcgaatgatagggacttagggtgatagaagtgcaaagcatgactgtcaaatttttggagcaggttttctgacttcggtcggaaaaccccttctttactgttatatgttaggcgaaatattacgcgtttggagtaagtggtgctttttgtaactgaaaagagattctgtgtgtgtttttttttttttagaggctgcatagttatttgtatgaaccgcaggtgacctaattagcaaggtaattcagacctgtatcctagcacttaagaagtggaagtgggataaccctgcgtgttctcgtgtgggaggctagcttaagcaacaaagcaggaaggccccaccaacaaaagaatttaaaaattatacgtgcgtggtggcgcgcgtatgaggaaattatttggcaactgtgttacagtatagcagcaaatggaatagacctagtccctgactttaggagacctgcctcagccccccgaatggctgggactacaggcgtgcgcctccgcgcccagctaatttttgcatttttggtagagacgggttcaccatgttggccaggatggtctccatctcttcatctggtgatccgcc

SEQ ID NO: 640 - DNA, 1087 bp, synthetic construct
  source 1..1087: mol_type = other DNA
gacaagagaaggactgaactgggggagtgagggaagaatgcgagagtgagactcagagagtaaaggggagggaaaaaaaagaagagagaaagggcgaggaagggggcgaccgcaggagggagacagacctggagtccactcggaggcctggagccgcacaaagcgccaggtcagcggtcccggctgggtgagaccagcaggcggctctagcgcgcgggagctgggcgaggctccgggacgacctcaccaatggagactgcagtatttagcatgccccacccatctgcaaggcattctggatagtgtcaaaacagccggaaatcaagtccgtttatctcaaactttagcattttgggaataaatgatatttgctatgctggttaaattagattttagttaaatttcctgctgaagctctagtacgataagcaacttgacctaagtgtaaagttgagacttccttcaggtttatatagcttgtgcgccgcttgggtacctcgaatgatagggacttagggtgatagaagtgcaaagcatgactgtcaaatttttggagcaggttttctgacttcggtcggaaaacccctaccttattcacgcctaaaaagtagactgactgtggggtggtcgtgttttttgtttcttgttggtaggtggtgaatgcgtttttttcgttgttttctccgttactcaggctgccagttgcttggcagtcttgtcgctggctgtggacgctctgcacttcatcaccgtccccagctgcgctttgagccggtctaaggttgcccacagtattgacgttgggacccacgaaactggcaatttccatgtgtgcggccttacccagttctcccaaacttctgcgtataaccgcttctctgtgcttcagaaagataagtccggccccggcctcacacagcagctcagttcgtgacagcgtttaatatgtaaaatggagcaaataatttatagggcgttgggagagttaaagagactaattcatttacgtgttaaatacagggaatggcttttgcattgatataaccccagcctccagcatgcgccagacctgacgtaggtgttcggc

SEQ ID NO: 641 - DNA, 1087 bp, synthetic construct
  source 1..1087: mol_type = other DNA
gacaagagaaggactgaactgggggagtgagggaagaatgcgagagtgagactcagagagtaaaggggagggaaaaaaaagaagagagaaagggcgaggaagggggcgaccgcaggagggagacagacctggagtccactcggaggcctggagccgcacaaagcgccaggtcagcggtcccggctgggtgagaccagcaggcggctctagcgcgcgggagctgggcgaggctccgggacgacctcaccaatggagactgcagtatttagcatgccccacccatctgcaaggcattctggatagtgtcaaaacagccggaaatcaagtccgtttatctcaaactttagcattttgggaataaatgatatttgctatgctggttaaattagattttagttaaatttcctgctgaagctctagtacgataagcaacttgacctaagtgtaaagttgagacttccttcaggtttatatagcttgtgcgccgcttgggtacctcgaatgatagggacttagggtgatagaagtgcaaagcatgactgtcaaatttttggagcaggttttctgacttcggtcggaaaaccccttttgacccattacccatctaagttagatgcttttttaaatgttttttaatttttaaatttttaatttttttcattatttattttttatttttgagacggatctcggctcactgtaacctccacctcccgggttcaagcgattctcctgactcagcctcccgagtagctgggattacaggcgcgcgccaccatgcccggctaatttttctatttttagtaaagacggggtttcgccatgttgaccagggtggtcttgaactcctgacgtcaggtgatcctcctgcctcgtgctgggattgcaggcgtgagccaccgctcccggcccttagatgctttttaatcagcaagtacgcaatgctttcctgacaggaatgtcaagtccgtcaggaaatccacataagggtgttaagcaggcaaagtaccacatacagattaaaatcaaaagcactgtcaacgcttatttaatttatacagtagaccctaacttttctaattttgtg

SEQ ID NO: 642 - DNA, 1087 bp, synthetic construct
  source 1..1087: mol_type = other DNA
gacaagagaaggactgaactgggggagtgagggaagaatgcgagagtgagactcagagagtaaaggggagggaaaaaaaagaagagagaaagggcgaggaagggggcgaccgcaggagggagacagacctggagtccactcggaggcctggagccgcacaaagcgccaggtcagcggtcccggctgggtgagaccagcaggcggctctagcgcgcgggagctgggcgaggctccgggacgacctcaccaatggagactgcagtatttagcatgccccacccatctgcaaggcattctggatagtgtcaaaacagccggaaatcaagtccgtttatctcaaactttagcattttgggaataaatgatatttgctatgctggttaaattagattttagttaaatttcctgctgaagctctagtacgataagcaacttgacctaagtgtaaagttgagacttccttcaggtttatatagcttgtgcgccgcttgggtacctcgaatgatagggacttagggtgatagaagtgcaaagcatgactgtcaaatttttggagcaggttttctgacttcggtcggaaaacccctgtttacttggttttaaaaatagcttgcactagcgataccgcgaatatggttattaggtttgttaggcacagtcgtgtcttactatagaaaaataacgtagtgttcattttgctgcctgtatgtgttaatttgtccttattgcgccattgttcttgttaagtcttctgtaaggagttgcgggtttcaaactgtcagtctgagagcataagctcacttttcagtcagttgaattgaatgttacattcgattggttctggatattgatattacccaaggcttgtcctgtttgtaagtcttttcctacacctgacaatatgattatgtttacaatgtccctagaactctgggtgtatcgttcccactgaataaaatttgatctctaagttgacctataaatttaagtaccaaaaaactggtttgtaagattttggaaggcagaggcagggaagagaccaacgtggtctacatataaagtaccaggtacatataaagtaccaggt

SEQ ID NO: 643 - DNA, 1083 bp, synthetic construct
  source 1..1083: mol_type = other DNA
gacaagagaaggactgaactgggggagtgagggaagaatgcgagagtgagactcagagagtaaaggggagggaaaaaaaagaagagagaaagggcgaggaagggggcgaccgcaggagggagacagacctggagtccactcggaggcctggagccgcacaaagcgccaggtcagcggtcccggctgggtgagaccagcaggcggctctagcgcgcgggagctgggcgaggctccgggacgacctcaccaatggagactgcagtatttagcatgccccacccatctgcaaggcattctggatagtgtcaaaacagccggaaatcaagtccgtttatctcaaactttagcattttgggaataaatgatatttgctatgctggttaaattagattttagttaaatttcctgctgaagctctagtacgataagcaacttgacctaagtgtaaagttgagacttccttcaggtttatatagcttgtgcgccgcttgggtacctcgaatgatagggacttagggtgatagaagtgcaaagcatgactgtcaaatttttggagcaggttttctgacttcggtcggaaaacccctatttttgtggtgctaaaagttagattgcattccgcccttctcacgtctctttacgtgttgtttgcgaggcgtggcctcggaggtaaatggtctccttttacctcagataagcttacctttgctctgtgagtaagaatgtagctacacttccaaatttagctattgtcctttgcggtccaaatgaaaatattaccttccgatctaacaatgttaaactagtcccaggcccttctatcgattgccagaatagactagactactacacagacacaccctctcaaatcaggccagctcctgcaacctgcacctacagtttgtcccctgggacaaatgaaaggacaggccctctttcccccccccccccaaatcagagcacacacagatcttggggtctggggcagaaatttcgttcatggaaaaaacaaacaaacaaacaaacacgatcaaaggaagctcgttccctttggcctcagggtttcttagacgccgtgttccc

SEQ ID NO: 644 - DNA, 1084 bp, synthetic construct
  source 1..1084: mol_type = other DNA
gacaagagaaggactgaactgggggagtgagggaagaatgcgagagtgagactcagagagtaaaggggagggaaaaaaaagaagagagaaagggcgaggaagggggcgaccgcaggagggagacagacctggagtccactcggaggcctggagccgcacaaagcgccaggtcagcggtcccggctgggtgagaccagcaggcggctctagcgcgcgggagctgggcgaggctccgggacgacctcaccaatggagactgcagtatttagcatgccccacccatctgcaaggcattctggatagtgtcaaaacagccggaaatcaagtccgtttatctcaaactttagcattttgggaataaatgatatttgctatgctggttaaattagattttagttaaatttcctgctgaagctctagtacgataagcaacttgacctaagtgtaaagttgagacttccttcaggtttatatagcttgtgcgccgcttgggtacctcgaatgatagggacttagggtgatagaagtgcaaagcatgactgtcaaatttttggagcaggttttctgacttcggtcggaaaacccctataactggtaaccaaaagcagattactttcccccttgtggtcttcgcgtttgcggacgggagagaactttcggccattttccttttagaaatttaacttcttgaaggccaccaggtgacccttacttccctctcacctttccttctacctgtactttctctattaaaaagcctgcagaagtacccttgacaaattgccaaaaatgacacctaaaaaaaaaaaaaggaaaaacgacaccttaggtaattataggttgtaagaaaaagatttgacctcttggagtttttatttcttaataccaaaggacacccaaggaacgtatctctcaaaattgggtttcaaacctcagccgtttccttcttagttccagtgcttaacacgcaacagacctgcacaccactacactgcatacgagttttaaagttaataaatcagtcacccctccatagtcttctacctacttgaagacagaaacggctgctaggaagcaattcttc

SEQ ID NO: 645 - DNA, 1087 bp, synthetic construct
  source 1..1087: mol_type = other DNA
gacaagagaaggactgaactgggggagtgagggaagaatgcgagagtgagactcagagagtaaaggggagggaaaaaaaagaagagagaaagggcgaggaagggggcgaccgcaggagggagacagacctggagtccactcggaggcctggagccgcacaaagcgccaggtcagcggtcccggctgggtgagaccagcaggcggctctagcgcgcgggagctgggcgaggctccgggacgacctcaccaatggagactgcagtatttagcatgccccacccatctgcaaggcattctggatagtgtcaaaacagccggaaatcaagtccgtttatctcaaactttagcattttgggaataaatgatatttgctatgctggttaaattagattttagttaaatttcctgctgaagctctagtacgataagcaacttgacctaagtgtaaagttgagacttccttcaggtttatatagcttgtgcgccgcttgggtacctcgaatgatagggacttagggtgatagaagtgcaaagcatgactgtcaaatttttggagcaggttttctgacttcggtcggaaaacccctctggggaataagagtggtttaaagaaagaacaatttgagagatctgcttagatctaataaaacccaagtatagtttctttagacgtcttatatctcacgtaggacctcttatttcagactcactgcaagaacaagctaaagaactatatacagtcaggaacaaggtgagccatcgcggttctcagtcccatgatcttaagagtttttcctcttcccctcttccctggctgtcctggagctcactctgtagaccaggctggtctcaaactcagaaatccacttacctctgcctcccaagggctgggattaaaggcatgcaccaccattgcccggcagggtatgtggactatgctgtccttcaactcagagatcgtggtactttaaatctcattttccgaaagaaaagaaaagaaaggaaggggggaaataaagccagtatattttgcacccacaatctgaagttctacaaatattgttagaaaatgcaaaggacccaagtc

SEQ ID NO: 646 - DNA, 1087 bp, synthetic construct
  source 1..1087: mol_type = other DNA
gacaagagaaggactgaactgggggagtgagggaagaatgcgagagtgagactcagagagtaaaggggagggaaaaaaaagaagagagaaagggcgaggaagggggcgaccgcaggagggagacagacctggagtccactcggaggcctggagccgcacaaagcgccaggtcagcggtcccggctgggtgagaccagcaggcggctctagcgcgcgggagctgggcgaggctccgggacgacctcaccaatggagactgcagtatttagcatgccccacccatctgcaaggcattctggatagtgtcaaaacagccggaaatcaagtccgtttatctcaaactttagcattttgggaataaatgatatttgctatgctggttaaattagattttagttaaatttcctgctgaagctctagtacgataagcaacttgacctaagtgtaaagttgagacttccttcaggtttatatagcttgtgcgccgcttgggtacctcgaatgatagggacttagggtgatagaagtgcaaagcatgactgtcaaatttttggagcaggttttctgacttcggtcggaaaacccctctcggtttatcttaaagggttttaaatatagaaagcttccttagtcttatgggtgagagtgctgtttaagccttacctaggtatgtctttgaacatttattacagattgttatttgtgactatgaccactcaggtgttctgttcttgtgaatttagacacactcagaaaggctacacactcaaagaccacaccaaagtgaagtactatctgggccgtgaaactggtcacatatcagttattttgcagtaaaacaaggaagtcaatcatactgcttcagtgggtcagggagtcaagaatgcacagtacaagagctggtgagattcctcagcaggtaagagcactgaatgctcttccaaagattctgagttcaaatcccagcaaccacgtggtggatttgaacaaaggatgaaaacaaccatccataaccagatctgatgccctcttctggagtgtcaaaagacagctatggtgtacttacataaataaataagtaaaaaca

SEQ ID NO: 647 - DNA, 1087 bp, synthetic construct
  source 1..1087: mol_type = other DNA
gacaagagaaggactgaactgggggagtgagggaagaatgcgagagtgagactcagagagtaaaggggagggaaaaaaaagaagagagaaagggcgaggaagggggcgaccgcaggagggagacagacctggagtccactcggaggcctggagccgcacaaagcgccaggtcagcggtcccggctgggtgagaccagcaggcggctctagcgcgcgggagctgggcgaggctccgggacgacctcaccaatggagactgcagtatttagcatgccccacccatctgcaaggcattctggatagtgtcaaaacagccggaaatcaagtccgtttatctcaaactttagcattttgggaataaatgatatttgctatgctggttaaattagattttagttaaatttcctgctgaagctctagtacgataagcaacttgacctaagtgtaaagttgagacttccttcaggtttatatagcttgtgcgccgcttgggtacctcgaatgatagggacttagggtgatagaagtgcaaagcatgactgtcaaatttttggagcaggttttctgacttcggtcggaaaacccctccacattttgtgtttaaaaatagaaatatttaagtgagatcagtttaaatctgctttatctagggtgtctaactgcttgcatctttttaacttttccttatttgtgagaaggtctgtaaaacttattatatgttagtacactgtagctgtcttcagacactccagaagagggattcagatcaccttacagatggttttgagccaccatgtggttgctgggatttgaactcaggacctttagaaaagtagttgggtgctcttacccgctgagccatctcaccagccctttttttttcttttttccagttcgggtttctctgtgtgtagccctggctgtcctggaactcattctgtagaccgggctggcctcgaactcagaaatctgcctgcctctgcctcccaagtgctgggattaaaggaatgtgccttcattgcccggctctagggctttttgttgttgtttgtttgtttgtttgtttgtttgcttttgtggatggcct

SEQ ID NO: 648 - DNA, 1087 bp, synthetic construct
  source 1..1087: mol_type = other DNA
gacaagagaaggactgaactgggggagtgagggaagaatgcgagagtgagactcagagagtaaaggggagggaaaaaaaagaagagagaaagggcgaggaagggggcgaccgcaggagggagacagacctggagtccactcggaggcctggagccgcacaaagcgccaggtcagcggtcccggctgggtgagaccagcaggcggctctagcgcgcgggagctgggcgaggctccgggacgacctcaccaatggagactgcagtatttagcatgccccacccatctgcaaggcattctggatagtgtcaaaacagccggaaatcaagtccgtttatctcaaactttagcattttgggaataaatgatatttgctatgctggttaaattagattttagttaaatttcctgctgaagctctagtacgataagcaacttgacctaagtgtaaagttgagacttccttcaggtttatatagcttgtgcgccgcttgggtacctcgaatgatagggacttagggtgatagaagtgcaaagcatgactgtcaaatttttggagcaggttttctgacttcggtcggaaaacccctaaaaccagtaagggagaaaggtcaagtaacatataaaggaaggcctatcagaattacaccagacttttcaccagagactatgaaagccagaagagcctggacagatgttatacagacactaagagaacacaaatgccagcccaggctactatacctggccaaactctcaattaccatagatggagaaaccaaagtattccacgacaaaaacaaattcacacaatatctttccacgaatccagcccttcaaaggataatgacagaaaagaagcaatacaaggacggaaatcacgccctagaacaaccaagaaactaatcattcaacaaaccaaaaagaagacagccacaagaacagaatgccaactctaacaacaaaaataaaaggaagcaacaattacttttccttaatatctcttaatatcaatggactcaattccccaataaaaagacatagactaacagactggctacacaaacaggacccaacattctgctgctta

SEQ ID NO: 649 - DNA, 1087 bp, synthetic construct
  source 1..1087: mol_type = other DNA
gacaagagaaggactgaactgggggagtgagggaagaatgcgagagtgagactcagagagtaaaggggagggaaaaaaaagaagagagaaagggcgaggaagggggcgaccgcaggagggagacagacctggagtccactcggaggcctggagccgcacaaagcgccaggtcagcggtcccggctgggtgagaccagcaggcggctctagcgcgcgggagctgggcgaggctccgggacgacctcaccaatggagactgcagtatttagcatgccccacccatctgcaaggcattctggatagtgtcaaaacagccggaaatcaagtccgtttatctcaaactttagcattttgggaataaatgatatttgctatgctggttaaattagattttagttaaatttcctgctgaagctctagtacgataagcaacttgacctaagtgtaaagttgagacttccttcaggtttatatagcttgtgcgccgcttgggtacctcgaatgatagggacttagggtgatagaagtgcaaagcatgactgtcaaatttttggagcaggttttctgacttcggtcggaaaacccctcccaatttcactggtctacaatgaaagcaaaacagttctcttccccgctccccggtgtgtgagaggggctttgatccttctctggtttcctaggaaacgcgtatgtgctagagccacgctctgagacttccgcctcgtgcggtcccgcttcctttctgcctcctctggcctgcatccgtgggggaggtggctggctgcagggttctccggatctcttctgtgttcccactactcaagcaccgagtggcgttctatggcgtccgcctcggctcagcccgcggccctgagcgcggagcaggccaagggtgaggaaagagcctagtctgggtgtgggccgtcttctggggggagggcgcgatactattctttgcctctccaagtggggcccttgcccattagggcgaagggttgggaggacaagcttatcgggttgcttgcaggcctcggcccactaattccctgcctcttccctcctctgggctcgcccgccgtcctccgcg

SEQ ID NO: 650 - DNA, 1087 bp, synthetic construct
  source 1..1087: mol_type = other DNA
gacaagagaaggactgaactgggggagtgagggaagaatgcgagagtgagactcagagagtaaaggggagggaaaaaaaagaagagagaaagggcgaggaagggggcgaccgcaggagggagacagacctggagtccactcggaggcctggagccgcacaaagcgccaggtcagcggtcccggctgggtgagaccagcaggcggctctagcgcgcgggagctgggcgaggctccgggacgacctcaccaatggagactgcagtatttagcatgccccacccatctgcaaggcattctggatagtgtcaaaacagccggaaatcaagtccgtttatctcaaactttagcattttgggaataaatgatatttgctatgctggttaaattagattttagttaaatttcctgctgaagctctagtacgataagcaacttgacctaagtgtaaagttgagacttccttcaggtttatatagcttgtgcgccgcttgggtacctcgaatgatagggacttagggtgatagaagtgcaaagcatgactgtcaaatttttggagcaggttttctgacttcggtcggaaaacccctgaatttgttaaattacaggaggaagcttttttagttcattttacaaatactttcttgttaggtagataataccttctaaggttattatctggatcttctaagtctttttatcgctagcaagtctaagtttctggactttggaattagaagttaatgtcgtaggcgggcatggtggtccacgcctttaatcccagagtttgggaggcagacgcaggtggttttctgagttcgaggccatcctgctcttcaatgttagttccaggacagccagggttatacaaagaaaccctgtctcgagaaacaaaacaaacaaaaaaagagtagctgagtgctctgagttgtctctccagccccttagctatttattttcatttaaattatttttgttttattcgcttgtgtgcctgagtttgaatttcccgggattaacagttgaagactagggctggtgagatggctcagcggttaagattgccgactgctcttccaaaggtcctgag

SEQ ID NO: 651 - DNA, 1087 bp, synthetic construct
  source 1..1087: mol_type = other DNA
gacaagagaaggactgaactgggggagtgagggaagaatgcgagagtgagactcagagagtaaaggggagggaaaaaaaagaagagagaaagggcgaggaagggggcgaccgcaggagggagacagacctggagtccactcggaggcctggagccgcacaaagcgccaggtcagcggtcccggctgggtgagaccagcaggcggctctagcgcgcgggagctgggcgaggctccgggacgacctcaccaatggagactgcagtatttagcatgccccacccatctgcaaggcattctggatagtgtcaaaacagccggaaatcaagtccgtttatctcaaactttagcattttgggaataaatgatatttgctatgctggttaaattagattttagttaaatttcctgctgaagctctagtacgataagcaacttgacctaagtgtaaagttgagacttccttcaggtttatatagcttgtgcgccgcttgggtacctcgaatgatagggacttagggtgatagaagtgcaaagcatgactgtcaaatttttggagcaggttttctgacttcggtcggaaaacccctaccccctaattctacaagaatagaaagcttagcagctcctctgaatggttgctctcaggtgctagtggttgcaagtcgtatgttgatgcctgcctttgccctacctggtgtgtgagcgtgagcgcgccccacctctccagcctctctcttactgtttttcagacaagatgggactgttgttctcctactgctatgtacctcaatttcaattgatcatgcctggacataactgcccatgttgtaaggtcgtctacgttgtaaggtcgtgctcagtttctgatgcctagactagtcacctttccgtttgcctcctgactgtgtaaatgaggcaaatgaaggtggtctcttaactgacatgttagtgtttgacctatgggatagtttctcattgttgagacagaatttctagaagctggtccgctgagcggctaagagcacttgctgatattgcaaaggatctacctgggtttggttctcagcactcacatggaagttcacat

SEQ ID NO: 652 - DNA, 654 bp, synthetic construct
  source 1..654: mol_type = other DNA
gacaagagaaggactgaactgggggagtgagggaagaatgcgagagtgagactcagagagtaaaggggagggaaaaaaaagaagagagaaagggcgaggaagggggcgaccgcaggagggagacagacctggagtccactcggaggcctggagccgcacaaagcgccaggtcagcggtcccggctgggtgagaccagcaggcggctctagcgcgcgggagctgggcgaggctccgggacgacctcaccaatggagactgcagtatttagcatgccccacccatctgcaaggcattctggatagtgtcaaaacagccggaaatcaagtccgtttatctcaaactttagcattttgggaataaatgatatttgctatgctggttaaattagattttagttaaatttcctgctgaagctctagtacgataagcaacttgacctaagtgtaaagttgagacttccttcaggtttatatagcttgtgcgccgcttgggtacctcgaatgatagggacttagggtgatagaagtgcaaagcatgactgtcaaatttttggagcaggttttctgacttcggtcggaaaaccccttgtagttcctgcaatttaattttcgtttaaaactttattttattctttaacttaaaaaaaatatata

SEQ ID NO: 653 - DNA, 533 bp, synthetic construct; identical to SEQ ID NO: 365
  source 1..533: mol_type = other DNA

SEQ ID NO: 654 - DNA, 559 bp, synthetic construct; identical to SEQ ID NO: 366
  source 1..559: mol_type = other DNA

SEQ ID NO: 655 - DNA, 539 bp, synthetic construct; identical to SEQ ID NO: 367
  source 1..539: mol_type = other DNA

SEQ ID NO: 656 - DNA, 533 bp, synthetic construct; identical to SEQ ID NO: 368
  source 1..533: mol_type = other DNA

SEQ ID NO: 657 - DNA, 1087 bp, synthetic construct
  source 1..1087: mol_type = other DNA
cacaagtaatgtacttttaaaattaacctttctataccggttttcacagtgcggctgtttttgttgttcctcttagtgttaattcacactaaagactgtgcatccgactcctacatttatgaaagtaaatgcctattgttagaacaaaaaaggctacagaacaaaaaacaaagcgaaataccatctgctttaggttcagtggtattttcccgctgacagggaggcgggtttttgggtacaggaaacgagtcactatggaggcggtactatgtagatgagaattcaggagcaaactgggaaaagcaactgcttccaaatatttgtgatttttacagtgtagttttggaaaaactcttagcctaccaattcttctaagtgttttaaaatgtgggagccagtacacatgaagttatagagtgttttaatgaggcttaaatatttaccgtaactatgaaatgctacgcatatcatgctgttcaggctccgtggccacgcaactcaatgatagggacttagggtgatagaagtgcaaagcatgactgtcaaatttttggagcaggttttctgacttcggtcggaaaacccctactttctggagtttcaaaaacagactgtacgccaagggtcatatctttttttgtattggtttgtgtcttggttggtgtcttaggtgttaatcctacagtggagggtttatgggaataggaagtaacatgtcgcctgcatgtcataggagaaaaagcgagcatcagccgtatcggctttgtaacacaaattagctatcgtgaagtccgctcagctcttccctttctaccctggctgctttttgcagggattggtccgtggtctccagtctcttgggttctcaccctgtgtgaaaatcttcgtgtttttccctaccccccagtcacctcttacacagcctctgcttccaagcgcagcccccacaggagtttgtaggatttctgtgctagcggggaatgtgttctcacctcatagagccaggtagaaattatgcagatgggcagttctctgggaagaaagcagggcctttggggctctcagtgtccccgttgggttgtagaca

SEQ ID NO: 658 - DNA, 1087 bp, synthetic construct
  source 1..1087: mol_type = other DNA
cacaagtaatgtacttttaaaattaacctttctataccggttttcacagtgcggctgtttttgttgttcctcttagtgttaattcacactaaagactgtgcatccgactcctacatttatgaaagtaaatgcctattgttagaacaaaaaaggctacagaacaaaaaacaaagcgaaataccatctgctttaggttcagtggtattttcccgctgacagggaggcgggtttttgggtacaggaaacgagtcactatggaggcggtactatgtagatgagaattcaggagcaaactgggaaaagcaactgcttccaaatatttgtgatttttacagtgtagttttggaaaaactcttagcctaccaattcttctaagtgttttaaaatgtgggagccagtacacatgaagttatagagtgttttaatgaggcttaaatatttaccgtaactatgaaatgctacgcatatcatgctgttcaggctccgtggccacgcaactcaatgatagggacttagggtgatagaagtgcaaagcatgactgtcaaatttttggagcaggttttctgacttcggtcggaaaacccctactttctggagtttctaaaagtagactgtacgctaagggtcatatctttttttgttttggtttgtgtcttggttggcgtcttaaatgttaatcctacagtggagggctggcgaataggaagtaacatgtcgcctgcacgccataggagaaaaagcgagcatcagccgtatcggctttgtaacacaaattagctatcgtgaagtccgctcagctcttccctttctaccctggctgctttttgcagggattggtccgtggtctccagtctcttgggttctcaccctgtgtgaaaatcttcctgtttttccctaccccccaagtcacctcttacacagcctctgcttccaagcgcagcccccacaggagtttgtaggatttctgtgctagcggggagtgtgttctcacctcatagagccaggtagaaactacgcagatgggtgctgttctccaggaagaaagcagggcctttggggctctcagtgtccccgttgggttgtaga

SEQ ID NO: 659 - DNA, 1087 bp, synthetic construct
  source 1..1087: mol_type = other DNA
cacaagtaatgtacttttaaaattaacctttctataccggttttcacagtgcggctgtttttgttgttcctcttagtgttaattcacactaaagactgtgcatccgactcctacatttatgaaagtaaatgcctattgttagaacaaaaaaggctacagaacaaaaaacaaagcgaaataccatctgctttaggttcagtggtattttcccgctgacagggaggcgggtttttgggtacaggaaacgagtcactatggaggcggtactatgtagatgagaattcaggagcaaactgggaaaagcaactgcttccaaatatttgtgatttttacagtgtagttttggaaaaactcttagcctaccaattcttctaagtgttttaaaatgtgggagccagtacacatgaagttatagagtgttttaatgaggcttaaatatttaccgtaactatgaaatgctacgcatatcatgctgttcaggctccgtggccacgcaactcaatgatagggacttagggtgatagaagtgcaaagcatgactgtcaaatttttggagcaggttttctgacttcggtcggaaaacccctactttctggagtttcaaaaacagaccgtacgccaagggtcatgtcttttttcgtattggtttgtgtcttagttgttaatcctacagtggaggcctggggaataagaagtaacatgtggcctgcacgccataggagaaaaagcgagcatcagccgtatcggctttgtaacacaaattagctatcgtgaagtccgctcagctcttccatttctaccctggctgctttttgcagggattggtccgtggtctccagtctcttgggttctcaccctgtgtgaaaatcttcgtgtttttccctaccccccaagtcacctcttacacagcctctgcttccaagcgcagcccccacaggagtttgtaggatttctgtgctagcggggagtgtgttctcacctcatagagccaggtagaaattatgcagatgggcgctgttctctgggaagaaagcagggcctttggggctctcagtgtccccgttgggttgtagacataacactctta

SEQ ID NO: 660 - DNA, 891 bp, synthetic construct
  source 1..891: mol_type = other DNA
cacaagtaatgtacttttaaaattaacctttctataccggttttcacagtgcggctgtttttgttgttcctcttagtgttaattcacactaaagactgtgcatccgactcctacatttatgaaagtaaatgcctattgttagaacaaaaaaggctacagaacaaaaaacaaagcgaaataccatctgctttaggttcagtggtattttcccgctgacagggaggcgggtttttgggtacaggaaacgagtcactatggaggcggtactatgtagatgagaattcaggagcaaactgggaaaagcaactgcttccaaatatttgtgatttttacagtgtagttttggaaaaactcttagcctaccaattcttctaagtgttttaaaatgtgggagccagtacacatgaagttatagagtgttttaatgaggcttaaatatttaccgtaactatgaaatgctacgcatatcatgctgttcaggctccgtggccacgcaactcaatgatagggacttagggtgatagaagtgcaaagcatgactgtcaaatttttggagcaggttttctgacttcggtcggaaaacccctcctccggggatacaacgtgtttcctaaaagtagagggaggtaagagacggtagcacctgcggggcggcttgcacgccgagtgcctgtgacgcgccggcttaacttaactgcttccctgaagtaccttgaggttcctgatgtgcgggcggtagacggtaggcttatgcggcacgctgtcgtttccaccgtggctactgcgctttgggaaggccacgacctcctcctttggggaggtccttaggatctcagcttggcagtcgagtgggtggcgaccttttaaaggaatgggacccacccggagttc

SEQ ID NO: 661 - DNA, 1079 bp, synthetic construct
  source 1..1079: mol_type = other DNA
cacaagtaatgtacttttaaaattaacctttctataccggttttcacagtgcggctgtttttgttgttcctcttagtgttaattcacactaaagactgtgcatccgactcctacatttatgaaagtaaatgcctattgttagaacaaaaaaggctacagaacaaaaaacaaagcgaaataccatctgctttaggttcagtggtattttcccgctgacagggaggcgggtttttgggtacaggaaacgagtcactatggaggcggtactatgtagatgagaattcaggagcaaactgggaaaagcaactgcttccaaatatttgtgatttttacagtgtagttttggaaaaactcttagcctaccaattcttctaagtgttttaaaatgtgggagccagtacacatgaagttatagagtgttttaatgaggcttaaatatttaccgtaactatgaaatgctacgcatatcatgctgttcaggctccgtggccacgcaactcaatgatagggacttagggtgatagaagtgcaaagcatgactgtcaaatttttggagcaggttttctgacttcggtcggaaaacccctttcccttcttgtaatacaaaataataacaaccacagaggacatcgcaagtaaaatgtgtataacaaccccatctaaagaaccctatcatctttctactatctgtctacctaaatatgtatagtataaataaccctatatagcactctaagcaacttaagttaggtaacttagaaaactcttttttttttttgagactgagtctcactctgtcgcacccaggctggagtgcagtggcgtgatctcggctcactgcaacctccaccttctgggttcaagtgattctcccatctcagtctcccaagtagctgggattacaggcacgccaccatgccctgctacatttttttttttttagtagagatgaggtttcaccacattggccaggctgttctcgaactcctgacctcaggtgatccgcccaccttggcctcatgaagtgctgggattacaggtgtgagccactgtacccagccagaaaactcttaaaaaac

SEQ ID NO: 662 - DNA, 969 bp, synthetic construct
  source 1..969: mol_type = other DNA
cacaagtaatgtacttttaaaattaacctttctataccggttttcacagtgcggctgtttttgttgttcctcttagtgttaattcacactaaagactgtgcatccgactcctacatttatgaaagtaaatgcctattgttagaacaaaaaaggctacagaacaaaaaacaaagcgaaataccatctgctttaggttcagtggtattttcccgctgacagggaggcgggtttttgggtacaggaaacgagtcactatggaggcggtactatgtagatgagaattcaggagcaaactgggaaaagcaactgcttccaaatatttgtgatttttacagtgtagttttggaaaaactcttagcctaccaattcttctaagtgttttaaaatgtgggagccagtacacatgaagttatagagtgttttaatgaggcttaaatatttaccgtaactatgaaatgctacgcatatcatgctgttcaggctccgtggccacgcaactcaatgatagggacttagggtgatagaagtgcaaagcatgactgtcaaatttttggagcaggttttctgacttcggtcggaaaacccctctgaattttcttgcagttgaacaacagaggctttttttgtgtgtgtgggggtgcttggttttgggaggttgaagagtacttgttcgcaaactctctaaatgagagatggggaagtgtcttaccagctgattcgcgagagcacctgcaagtttacctgttttagtgatttgcgtttatgaaagttggagttgctgattttgtgatctctacttttaaggtaaaagcagggcggtgttgacttttcttgccagttggctgtcctgttttctttctcgcactgttttctttttgagacgaagtctgtcgctcaggctggagtgcactggcgtgatctcggctcgctgcaaactttgccgaacccctgtttagcgatttccgtttg

SEQ ID NO: 663 - DNA, 1087 bp, synthetic construct
  source 1..1087: mol_type = other DNA
cacaagtaatgtacttttaaaattaacctttctataccggttttcacagtgcggctgtttttgttgttcctcttagtgttaattcacactaaagactgtgcatccgactcctacatttatgaaagtaaatgcctattgttagaacaaaaaaggctacagaacaaaaaacaaagcgaaataccatctgctttaggttcagtggtattttcccgctgacagggaggcgggtttttgggtacaggaaacgagtcactatggaggcggtactatgtagatgagaattcaggagcaaactgggaaaagcaactgcttccaaatatttgtgatttttacagtgtagttttggaaaaactcttagcctaccaattcttctaagtgttttaaaatgtgggagccagtacacatgaagttatagagtgttttaatgaggcttaaatatttaccgtaactatgaaatgctacgcatatcatgctgttcaggctccgtggccacgcaactcaatgatagggacttagggtgatagaagtgcaaagcatgactgtcaaatttttggagcaggttttctgacttcggtcggaaaacccctatatgtggtaatccaacaatagaaattatttttaagtttgtgtgttcctttttctgttcaatggtgcttttgatattgttgtaaagcagtgactagcagattctgtgtggtaaaagcactgaaccctgtttagttcttttctccctaccttattggtaattatttctgtgtatatatgttccaaagaaatgcggcttgtatattcatgcttttcaactttttgtgatagacagttgatacacaagtagtacctcctccgggatcttcttagtcaagactgtttggtagatgcatgttttttgttacttgtaatgtacagtattcagttcattttctttttgcagcactgtccggttgaaacacaacgcgaggatcgggcgtggtggctcacgcctgtaatcccagcactttgggaggccgaggcaggacaatcaagaccaatcctggtcatcaaggcaggagaatcaagaccatcgaggtcaggagatcaagaccatcct

SEQ ID NO: 664 - DNA, 1085 bp, synthetic construct
  source 1..1085: mol_type = other DNA
cacaagtaatgtacttttaaaattaacctttctataccggttttcacagtgcggctgtttttgttgttcctcttagtgttaattcacactaaagactgtgcatccgactcctacatttatgaaagtaaatgcctattgttagaacaaaaaaggctacagaacaaaaaacaaagcgaaataccatctgctttaggttcagtggtattttcccgctgacagggaggcgggtttttgggtacaggaaacgagtcactatggaggcggtactatgtagatgagaattcaggagcaaactgggaaaagcaactgcttccaaatatttgtgatttttacagtgtagttttggaaaaactcttagcctaccaattcttctaagtgttttaaaatgtgggagccagtacacatgaagttatagagtgttttaatgaggcttaaatatttaccgtaactatgaaatgctacgcatatcatgctgttcaggctccgtggccacgcaactcaatgatagggacttagggtgatagaagtgcaaagcatgactgtcaaatttttggagcaggttttctgacttcggtcggaaaacccctacatcaggttgtttttctgtttttacatcaggttgtttttctgtttggttttttttttacaccacgtttatacgccggtgcacggtttaccactgaaaacacctttcatctacaggtgatatcttttaacacaaataaaatgtagtagtcctaggagacggaatagaaggaggtggggcctaggcagattcatctctgcggtgcattttgcctctggccctcgggccctagtttgcgatctttcccatcttgcctctgcttccctctgcacaatcctgagtattgcagtaccttacacttaaggaaatttcgtcttgccaaagttgatccatttcagctccgaaacataacaggaactagtgcaacgataaacgtatgaggaacttgcaataagagtgacagaatcctttgaatcaaaaaaaaaaaaagccaccacttaatgagtatctaccatatgtcaagggcttcaccaatatttcattgaaatattccagacca

SEQ ID NO: 665 - DNA, 1087 bp, synthetic construct
  source 1..1087: mol_type = other DNA
cacaagtaatgtacttttaaaattaacctttctataccggttttcacagtgcggctgtttttgttgttcctcttagtgttaattcacactaaagactgtgcatccgactcctacatttatgaaagtaaatgcctattgttagaacaaaaaaggctacagaacaaaaaacaaagcgaaataccatctgctttaggttcagtggtattttcccgctgacagggaggcgggtttttgggtacaggaaacgagtcactatggaggcggtactatgtagatgagaattcaggagcaaactgggaaaagcaactgcttccaaatatttgtgatttttacagtgtagttttggaaaaactcttagcctaccaattcttctaagtgttttaaaatgtgggagccagtacacatgaagttatagagtgttttaatgaggcttaaatatttaccgtaactatgaaatgctacgcatatcatgctgttcaggctccgtggccacgcaactcaatgatagggacttagggtgatagaagtgcaaagcatgactgtcaaatttttggagcaggttttctgacttcggtcggaaaacccctcttatgatgtttgttgccaatgatagattgttttcactgtgcaaaaattatgggtagttttggtggtcttgatgcagttgtaagcttggggtatgaaggtttgggccacgcctgggcgcttccggctgcgccggatgctgtttcctttccgctcccaggggcgttgggaacggttgtaggacgtggctctttattcgtgagttttccatttacctccgctgaacctagagcttcagacgccctatggcgtccgcctcgacccaaccggcggccttgagcgctgagcaagcaaagggtgagaatcgtcctagtcaaggcataggctgctggcctggggtagtcaaggcatgggctgctggtctggggaggatgcgggcggaggatgtggggcgacaaacctggctacgtccgccgggaaaatggggtaggggacgccgggtaccgtccttctaagtggggcgcttgcccccaagacttgggatcttattgggttacctaca

SEQ ID NO: 666 - DNA, 1085 bp, synthetic construct
  source 1..1085: mol_type = other DNA
cacaagtaatgtacttttaaaattaacctttctataccggttttcacagtgcggctgtttttgttgttcctcttagtgttaattcacactaaagactgtgcatccgactcctacatttatgaaagtaaatgcctattgttagaacaaaaaaggctacagaacaaaaaacaaagcgaaataccatctgctttaggttcagtggtattttcccgctgacagggaggcgggtttttgggtacaggaaacgagtcactatggaggcggtactatgtagatgagaattcaggagcaaactgggaaaagcaactgcttccaaatatttgtgatttttacagtgtagttttggaaaaactcttagcctaccaattcttctaagtgttttaaaatgtgggagccagtacacatgaagttatagagtgttttaatgaggcttaaatatttaccgtaactatgaaatgctacgcatatcatgctgttcaggctccgtggccacgcaactcaatgatagggacttagggtgatagaagtgcaaagcatgactgtcaaatttttggagcaggttttctgacttcggtcggaaaaccccttctttactgttatatgttaggcgaaatattacgcgtttggagtaagtggtgctttttgtaactgaaaagagattctgtgtgtgtttttttttttttagaggctgcatagttatttgtatgaaccgcaggtgacctaattagcaaggtaattcagacctgtatcctagcacttaagaagtggaagtgggataaccctgcgtgttctcgtgtgggaggctagcttaagcaacaaagcaggaaggccccaccaacaaaagaatttaaaaattatacgtgcgtggtggcgcgcgtatgaggaaattatttggcaactgtgttacagtatagcagcaaatggaatagacctagtccctgactttaggagacctgcctcagccccccgaatggctgggactacaggcgtgcgcctccgcgcccagctaatttttgcatttttggtagagacgggttcaccatgttggccaggatggtctccatctcttcatctggtgatccgcc

SEQ ID NO: 667 - DNA, 1087 bp, synthetic construct
  source 1..1087: mol_type = other DNA
cacaagtaatgtacttttaaaattaacctttctataccggttttcacagtgcggctgtttttgttgttcctcttagtgttaattcacactaaagactgtgcatccgactcctacatttatgaaagtaaatgcctattgttagaacaaaaaaggctacagaacaaaaaacaaagcgaaataccatctgctttaggttcagtggtattttcccgctgacagggaggcgggtttttgggtacaggaaacgagtcactatggaggcggtactatgtagatgagaattcaggagcaaactgggaaaagcaactgcttccaaatatttgtgatttttacagtgtagttttggaaaaactcttagcctaccaattcttctaagtgttttaaaatgtgggagccagtacacatgaagttatagagtgttttaatgaggcttaaatatttaccgtaactatgaaatgctacgcatatcatgctgttcaggctccgtggccacgcaactcaatgatagggacttagggtgatagaagtgcaaagcatgactgtcaaatttttggagcaggttttctgacttcggtcggaaaacccctaccttattcacgcctaaaaagtagactgactgtggggtggtcgtgttttttgtttcttgttggtaggtggtgaatgcgtttttttcgttgttttctccgttactcaggctgccagttgcttggcagtcttgtcgctggctgtggacgctctgcacttcatcaccgtccccagctgcgctttgagccggtctaaggttgcccacagtattgacgttgggacccacgaaactggcaatttccatgtgtgcggccttacccagttctcccaaacttctgcgtataaccgcttctctgtgcttcagaaagataagtccggccccggcctcacacagcagctcagttcgtgacagcgtttaatatgtaaaatggagcaaataatttatagggcgttgggagagttaaagagactaattcatttacgtgttaaatacagggaatggcttttgcattgatataaccccagcctccagcatgcgccagacctgacgtaggtgttcggc

SEQ ID NO: 668 - DNA, 1087 bp, synthetic construct
  source 1..1087: mol_type = other DNA
cacaagtaatgtacttttaaaattaacctttctataccggttttcacagtgcggctgtttttgttgttcctcttagtgttaattcacactaaagactgtgcatccgactcctacatttatgaaagtaaatgcctattgttagaacaaaaaaggctacagaacaaaaaacaaagcgaaataccatctgctttaggttcagtggtattttcccgctgacagggaggcgggtttttgggtacaggaaacgagtcactatggaggcggtactatgtagatgagaattcaggagcaaactgggaaaagcaactgcttccaaatatttgtgatttttacagtgtagttttggaaaaactcttagcctaccaattcttctaagtgttttaaaatgtgggagccagtacacatgaagttatagagtgttttaatgaggcttaaatatttaccgtaactatgaaatgctacgcatatcatgctgttcaggctccgtggccacgcaactcaatgatagggacttagggtgatagaagtgcaaagcatgactgtcaaatttttggagcaggttttctgacttcggtcggaaaaccccttttgacccattacccatctaagttagatgcttttttaaatgttttttaatttttaaatttttaatttttttcattatttattttttatttttgagacggatctcggctcactgtaacctccacctcccgggttcaagcgattctcctgactcagcctcccgagtagctgggattacaggcgcgcgccaccatgcccggctaatttttctatttttagtaaagacggggtttcgccatgttgaccagggtggtcttgaactcctgacgtcaggtgatcctcctgcctcgtgctgggattgcaggcgtgagccaccgctcccggcccttagatgctttttaatcagcaagtacgcaatgctttcctgacaggaatgtcaagtccgtcaggaaatccacataagggtgttaagcaggcaaagtaccacatacagattaaaatcaaaagcactgtcaacgcttatttaatttatacagtagaccctaacttttctaattttgtg

SEQ ID NO: 669 - DNA, 1087 bp, synthetic construct
  source 1..1087: mol_type = other DNA
cacaagtaatgtacttttaaaattaacctttctataccggttttcacagtgcggctgtttttgttgttcctcttagtgttaattcacactaaagactgtgcatccgactcctacatttatgaaagtaaatgcctattgttagaacaaaaaaggctacagaacaaaaaacaaagcgaaataccatctgctttaggttcagtggtattttcccgctgacagggaggcgggtttttgggtacaggaaacgagtcactatggaggcggtactatgtagatgagaattcaggagcaaactgggaaaagcaactgcttccaaatatttgtgatttttacagtgtagttttggaaaaactcttagcctaccaattcttctaagtgttttaaaatgtgggagccagtacacatgaagttatagagtgttttaatgaggcttaaatatttaccgtaactatgaaatgctacgcatatcatgctgttcaggctccgtggccacgcaactcaatgatagggacttagggtgatagaagtgcaaagcatgactgtcaaatttttggagcaggttttctgacttcggtcggaaaacccctgtttacttggttttaaaaatagcttgcactagcgataccgcgaatatggttattaggtttgttaggcacagtcgtgtcttactatagaaaaataacgtagtgttcattttgctgcctgtatgtgttaatttgtccttattgcgccattgttcttgttaagtcttctgtaaggagttgcgggtttcaaactgtcagtctgagagcataagctcacttttcagtcagttgaattgaatgttacattcgattggttctggatattgatattacccaaggcttgtcctgtttgtaagtcttttcctacacctgacaatatgattatgtttacaatgtccctagaactctgggtgtatcgttcccactgaataaaatttgatctctaagttgacctataaatttaagtaccaaaaaactggtttgtaagattttggaaggcagaggcagggaagagaccaacgtggtctacatataaagtaccaggtacatataaagtaccaggt

SEQ ID NO: 670 - DNA, 1083 bp, synthetic construct
  source 1..1083: mol_type = other DNA
cacaagtaatgtacttttaaaattaacctttctataccggttttcacagtgcggctgtttttgttgttcctcttagtgttaattcacactaaagactgtgcatccgactcctacatttatgaaagtaaatgcctattgttagaacaaaaaaggctacagaacaaaaaacaaagcgaaataccatctgctttaggttcagtggtattttcccgctgacagggaggcgggtttttgggtacaggaaacgagtcactatggaggcggtactatgtagatgagaattcaggagcaaactgggaaaagcaactgcttccaaatatttgtgatttttacagtgtagttttggaaaaactcttagcctaccaattcttctaagtgttttaaaatgtgggagccagtacacatgaagttatagagtgttttaatgaggcttaaatatttaccgtaactatgaaatgctacgcatatcatgctgttcaggctccgtggccacgcaactcaatgatagggacttagggtgatagaagtgcaaagcatgactgtcaaatttttggagcaggttttctgacttcggtcggaaaacccctatttttgtggtgctaaaagttagattgcattccgcccttctcacgtctctttacgtgttgtttgcgaggcgtggcctcggaggtaaatggtctccttttacctcagataagcttacctttgctctgtgagtaagaatgtagctacacttccaaatttagctattgtcctttgcggtccaaatgaaaatattaccttccgatctaacaatgttaaactagtcccaggcccttctatcgattgccagaatagactagactactacacagacacaccctctcaaatcaggccagctcctgcaacctgcacctacagtttgtcccctgggacaaatgaaaggacaggccctctttcccccccccccccaaatcagagcacacacagatcttggggtctggggcagaaatttcgttcatggaaaaaacaaacaaacaaacaaacacgatcaaaggaagctcgttccctttggcctcagggtttcttagacgccgtgttccc

SEQ ID NO: 671 - DNA, 1084 bp, synthetic construct
  source 1..1084: mol_type = other DNA
cacaagtaatgtacttttaaaattaacctttctataccggttttcacagtgcggctgtttttgttgttcctcttagtgttaattcacactaaagactgtgcatccgactcctacatttatgaaagtaaatgcctattgttagaacaaaaaaggctacagaacaaaaaacaaagcgaaataccatctgctttaggttcagtggtattttcccgctgacagggaggcgggtttttgggtacaggaaacgagtcactatggaggcggtactatgtagatgagaattcaggagcaaactgggaaaagcaactgcttccaaatatttgtgatttttacagtgtagttttggaaaaactcttagcctaccaattcttctaagtgttttaaaatgtgggagccagtacacatgaagttatagagtgttttaatgaggcttaaatatttaccgtaactatgaaatgctacgcatatcatgctgttcaggctccgtggccacgcaactcaatgatagggacttagggtgatagaagtgcaaagcatgactgtcaaatttttggagcaggttttctgacttcggtcggaaaacccctataactggtaaccaaaagcagattactttcccccttgtggtcttcgcgtttgcggacgggagagaactttcggccattttccttttagaaatttaacttcttgaaggccaccaggtgacccttacttccctctcacctttccttctacctgtactttctctattaaaaagcctgcagaagtacccttgacaaattgccaaaaatgacacctaaaaaaaaaaaaaggaaaaacgacaccttaggtaattataggttgtaagaaaaagatttgacctcttggagtttttatttcttaataccaaaggacacccaaggaacgtatctctcaaaattgggtttcaaacctcagccgtttccttcttagttccagtgcttaacacgcaacagacctgcacaccactacactgcatacgagttttaaagttaataaatcagtcacccctccatagtcttctacctacttgaagacagaaacggctgctaggaagcaattcttc

SEQ ID NO: 672 - DNA, 1087 bp, synthetic construct
  source 1..1087: mol_type = other DNA
cacaagtaatgtacttttaaaattaacctttctataccggttttcacagtgcggctgtttttgttgttcctcttagtgttaattcacactaaagactgtgcatccgactcctacatttatgaaagtaaatgcctattgttagaacaaaaaaggctacagaacaaaaaacaaagcgaaataccatctgctttaggttcagtggtattttcccgctgacagggaggcgggtttttgggtacaggaaacgagtcactatggaggcggtactatgtagatgagaattcaggagcaaactgggaaaagcaactgcttccaaatatttgtgatttttacagtgtagttttggaaaaactcttagcctaccaattcttctaagtgttttaaaatgtgggagccagtacacatgaagttatagagtgttttaatgaggcttaaatatttaccgtaactatgaaatgctacgcatatcatgctgttcaggctccgtggccacgcaactcaatgatagggacttagggtgatagaagtgcaaagcatgactgtcaaatttttggagcaggttttctgacttcggtcggaaaacccctctggggaataagagtggtttaaagaaagaacaatttgagagatctgcttagatctaataaaacccaagtatagtttctttagacgtcttatatctcacgtaggacctcttatttcagactcactgcaagaacaagctaaagaactatatacagtcaggaacaaggtgagccatcgcggttctcagtcccatgatcttaagagtttttcctcttcccctcttccctggctgtcctggagctcactctgtagaccaggctggtctcaaactcagaaatccacttacctctgcctcccaagggctgggattaaaggcatgcaccaccattgcccggcagggtatgtggactatgctgtccttcaactcagagatcgtggtactttaaatctcattttccgaaagaaaagaaaagaaaggaaggggggaaataaagccagtatattttgcacccacaatctgaagttctacaaatattgttagaaaatgcaaaggacccaagtc

SEQ ID NO: 673 - DNA, 1087 bp, synthetic construct
  source 1..1087: mol_type = other DNA
cacaagtaatgtacttttaaaattaacctttctataccggttttcacagtgcggctgtttttgttgttcctcttagtgttaattcacactaaagactgtgcatccgactcctacatttatgaaagtaaatgcctattgttagaacaaaaaaggctacagaacaaaaaacaaagcgaaataccatctgctttaggttcagtggtattttcccgctgacagggaggcgggtttttgggtacaggaaacgagtcactatggaggcggtactatgtagatgagaattcaggagcaaactgggaaaagcaactgcttccaaatatttgtgatttttacagtgtagttttggaaaaactcttagcctaccaattcttctaagtgttttaaaatgtgggagccagtacacatgaagttatagagtgttttaatgaggcttaaatatttaccgtaactatgaaatgctacgcatatcatgctgttcaggctccgtggccacgcaactcaatgatagggacttagggtgatagaagtgcaaagcatgactgtcaaatttttggagcaggttttctgacttcggtcggaaaacccctctcggtttatcttaaagggttttaaatatagaaagcttccttagtcttatgggtgagagtgctgtttaagccttacctaggtatgtctttgaacatttattacagattgttatttgtgactatgaccactcaggtgttctgttcttgtgaatttagacacactcagaaaggctacacactcaaagaccacaccaaagtgaagtactatctgggccgtgaaactggtcacatatcagttattttgcagtaaaacaaggaagtcaatcatactgcttcagtgggtcagggagtcaagaatgcacagtacaagagctggtgagattcctcagcaggtaagagcactgaatgctcttccaaagattctgagttcaaatcccagcaaccacgtggtggatttgaacaaaggatgaaaacaaccatccataaccagatctgatgccctcttctggagtgtcaaaagacagctatggtgtacttacataaataaataagtaaaaaca

SEQ ID NO: 674 - DNA, 1087 bp, synthetic construct
  source 1..1087: mol_type = other DNA
cacaagtaatgtacttttaaaattaacctttctataccggttttcacagtgcggctgtttttgttgttcctcttagtgttaattcacactaaagactgtgcatccgactcctacatttatgaaagtaaatgcctattgttagaacaaaaaaggctacagaacaaaaaacaaagcgaaataccatctgctttaggttcagtggtattttcccgctgacagggaggcgggtttttgggtacaggaaacgagtcactatggaggcggtactatgtagatgagaattcaggagcaaactgggaaaagcaactgcttccaaatatttgtgatttttacagtgtagttttggaaaaactcttagcctaccaattcttctaagtgttttaaaatgtgggagccagtacacatgaagttatagagtgttttaatgaggcttaaatatttaccgtaactatgaaatgctacgcatatcatgctgttcaggctccgtggccacgcaactcaatgatagggacttagggtgatagaagtgcaaagcatgactgtcaaatttttggagcaggttttctgacttcggtcggaaaacccctccacattttgtgtttaaaaatagaaatatttaagtgagatcagtttaaatctgctttatctagggtgtctaactgcttgcatctttttaacttttccttatttgtgagaaggtctgtaaaacttattatatgttagtacactgtagctgtcttcagacactccagaagagggattcagatcaccttacagatggttttgagccaccatgtggttgctgggatttgaactcaggacctttagaaaagtagttgggtgctcttacccgctgagccatctcaccagccctttttttttcttttttccagttcgggtttctctgtgtgtagccctggctgtcctggaactcattctgtagaccgggctggcctcgaactcagaaatctgcctgcctctgcctcccaagtgctgggattaaaggaatgtgccttcattgcccggctctagggctttttgttgttgtttgtttgtttgtttgtttgtttgcttttgtggatggcct

SEQ ID NO: 675 - DNA, 1087 bp, synthetic construct
  source 1..1087: mol_type = other DNA
cacaagtaatgtacttttaaaattaacctttctataccggttttcacagtgcggctgtttttgttgttcctcttagtgttaattcacactaaagactgtgcatccgactcctacatttatgaaagtaaatgcctattgttagaacaaaaaaggctacagaacaaaaaacaaagcgaaataccatctgctttaggttcagtggtattttcccgctgacagggaggcgggtttttgggtacaggaaacgagtcactatggaggcggtactatgtagatgagaattcaggagcaaactgggaaaagcaactgcttccaaatatttgtgatttttacagtgtagttttggaaaaactcttagcctaccaattcttctaagtgttttaaaatgtgggagccagtacacatgaagttatagagtgttttaatgaggcttaaatatttaccgtaactatgaaatgctacgcatatcatgctgttcaggctccgtggccacgcaactcaatgatagggacttagggtgatagaagtgcaaagcatgactgtcaaatttttggagcaggttttctgacttcggtcggaaaacccctaaaaccagtaagggagaaaggtcaagtaacatataaaggaaggcctatcagaattacaccagacttttcaccagagactatgaaagccagaagagcctggacagatgttatacagacactaagagaacacaaatgccagcccaggctactatacctggccaaactctcaattaccatagatggagaaaccaaagtattccacgacaaaaacaaattcacacaatatctttccacgaatccagcccttcaaaggataatgacagaaaagaagcaatacaaggacggaaatcacgccctagaacaaccaagaaactaatcattcaacaaaccaaaaagaagacagccacaagaacagaatgccaactctaacaacaaaaataaaaggaagcaacaattacttttccttaatatctcttaatatcaatggactcaattccccaataaaaagacatagactaacagactggctacacaaacaggacccaacattctgctgctta

SEQ ID NO: 676 - DNA, 1087 bp, synthetic construct
  source 1..1087: mol_type = other DNA
cacaagtaatgtacttttaaaattaacctttctataccggttttcacagtgcggctgtttttgttgttcctcttagtgttaattcacactaaagactgtgcatccgactcctacatttatgaaagtaaatgcctattgttagaacaaaaaaggctacagaacaaaaaacaaagcgaaataccatctgctttaggttcagtggtattttcccgctgacagggaggcgggtttttgggtacaggaaacgagtcactatggaggcggtactatgtagatgagaattcaggagcaaactgggaaaagcaactgcttccaaatatttgtgatttttacagtgtagttttggaaaaactcttagcctaccaattcttctaagtgttttaaaatgtgggagccagtacacatgaagttatagagtgttttaatgaggcttaaatatttaccgtaactatgaaatgctacgcatatcatgctgttcaggctccgtggccacgcaactcaatgatagggacttagggtgatagaagtgcaaagcatgactgtcaaatttttggagcaggttttctgacttcggtcggaaaacccctcccaatttcactggtctacaatgaaagcaaaacagttctcttccccgctccccggtgtgtgagaggggctttgatccttctctggtttcctaggaaacgcgtatgtgctagagccacgctctgagacttccgcctcgtgcggtcccgcttcctttctgcctcctctggcctgcatccgtgggggaggtggctggctgcagggttctccggatctcttctgtgttcccactactcaagcaccgagtggcgttctatggcgtccgcctcggctcagcccgcggccctgagcgcggagcaggccaagggtgaggaaagagcctagtctgggtgtgggccgtcttctggggggagggcgcgatactattctttgcctctccaagtggggcccttgcccattagggcgaagggttgggaggacaagcttatcgggttgcttgcaggcctcggcccactaattccctgcctcttccctcctctgggctcgcccgccgtcctccgcg

SEQ ID NO: 677 - DNA, 1087 bp, synthetic construct
  source 1..1087: mol_type = other DNA
cacaagtaatgtacttttaaaattaacctttctataccggttttcacagtgcggctgtttttgttgttcctcttagtgttaattcacactaaagactgtgcatccgactcctacatttatgaaagtaaatgcctattgttagaacaaaaaaggctacagaacaaaaaacaaagcgaaataccatctgctttaggttcagtggtattttcccgctgacagggaggcgggtttttgggtacaggaaacgagtcactatggaggcggtactatgtagatgagaattcaggagcaaactgggaaaagcaactgcttccaaatatttgtgatttttacagtgtagttttggaaaaactcttagcctaccaattcttctaagtgttttaaaatgtgggagccagtacacatgaagttatagagtgttttaatgaggcttaaatatttaccgtaactatgaaatgctacgcatatcatgctgttcaggctccgtggccacgcaactcaatgatagggacttagggtgatagaagtgcaaagcatgactgtcaaatttttggagcaggttttctgacttcggtcggaaaacccctgaatttgttaaattacaggaggaagcttttttagttcattttacaaatactttcttgttaggtagataataccttctaaggttattatctggatcttctaagtctttttatcgctagcaagtctaagtttctggactttggaattagaagttaatgtcgtaggcgggcatggtggtccacgcctttaatcccagagtttgggaggcagacgcaggtggttttctgagttcgaggccatcctgctcttcaatgttagttccaggacagccagggttatacaaagaaaccctgtctcgagaaacaaaacaaacaaaaaaagagtagctgagtgctctgagttgtctctccagccccttagctatttattttcatttaaattatttttgttttattcgcttgtgtgcctgagtttgaatttcccgggattaacagttgaagactagggctggtgagatggctcagcggttaagattgccgactgctcttccaaaggtcctgag

SEQ ID NO: 678 - DNA, 1087 bp, synthetic construct
  source 1..1087: mol_type = other DNA
cacaagtaatgtacttttaaaattaacctttctataccggttttcacagtgcggctgtttttgttgttcctcttagtgttaattcacactaaagactgtgcatccgactcctacatttatgaaagtaaatgcctattgttagaacaaaaaaggctacagaacaaaaaacaaagcgaaataccatctgctttaggttcagtggtattttcccgctgacagggaggcgggtttttgggtacaggaaacgagtcactatggaggcggtactatgtagatgagaattcaggagcaaactgggaaaagcaactgcttccaaatatttgtgatttttacagtgtagttttggaaaaactcttagcctaccaattcttctaagtgttttaaaatgtgggagccagtacacatgaagttatagagtgttttaatgaggcttaaatatttaccgtaactatgaaatgctacgcatatcatgctgttcaggctccgtggccacgcaactcaatgatagggacttagggtgatagaagtgcaaagcatgactgtcaaatttttggagcaggttttctgacttcggtcggaaaacccctaccccctaattctacaagaatagaaagcttagcagctcctctgaatggttgctctcaggtgctagtggttgcaagtcgtatgttgatgcctgcctttgccctacctggtgtgtgagcgtgagcgcgccccacctctccagcctctctcttactgtttttcagacaagatgggactgttgttctcctactgctatgtacctcaatttcaattgatcatgcctggacataactgcccatgttgtaaggtcgtctacgttgtaaggtcgtgctcagtttctgatgcctagactagtcacctttccgtttgcctcctgactgtgtaaatgaggcaaatgaaggtggtctcttaactgacatgttagtgtttgacctatgggatagtttctcattgttgagacagaatttctagaagctggtccgctgagcggctaagagcacttgctgatattgcaaaggatctacctgggtttggttctcagcactcacatggaagttcacat

SEQ ID NO: 679 - DNA, 654 bp, synthetic construct
  source 1..654: mol_type = other DNA
cacaagtaatgtacttttaaaattaacctttctataccggttttcacagtgcggctgtttttgttgttcctcttagtgttaattcacactaaagactgtgcatccgactcctacatttatgaaagtaaatgcctattgttagaacaaaaaaggctacagaacaaaaaacaaagcgaaataccatctgctttaggttcagtggtattttcccgctgacagggaggcgggtttttgggtacaggaaacgagtcactatggaggcggtactatgtagatgagaattcaggagcaaactgggaaaagcaactgcttccaaatatttgtgatttttacagtgtagttttggaaaaactcttagcctaccaattcttctaagtgttttaaaatgtgggagccagtacacatgaagttatagagtgttttaatgaggcttaaatatttaccgtaactatgaaatgctacgcatatcatgctgttcaggctccgtggccacgcaactcaatgatagggacttagggtgatagaagtgcaaagcatgactgtcaaatttttggagcaggttttctgacttcggtcggaaaaccccttgtagttcctgcaatttaattttcgtttaaaactttattttattctttaacttaaaaaaaatatata

SEQ ID NO: 680 - DNA, 1087 bp, synthetic construct
  source 1..1087: mol_type = other DNA
agtccttgctcttaactactgaaccaactctcccgtcctataagtaaattttcagagcactaatctattctacttcaagtttctcctgcatcagatccaggccagctggagcgagctacacggttaccccccctcctcccaaaggggaaaataaggatcaggtgaaaatgtttggaaattacaatagtagaatataaagaaagaatatgaaggcggccatgaaggggtagaaaggtagatgaccaggcgtcatccctgatgtcacgggtatgggcgtggtgtatgcagataagcgcgcagggtctgccgggtccgcgctccgtgcagaaatgtgaggggtttctcccgcggcgagggagggagcgcggatacgcgggtgtcagcagagcgcaagaatgtcgtgtgcgacgagggagacccgagatcggccagggctaagtgaccgtgtgttaagagtgtagaggcgacgggtgtgagccggggccgggcagtgggaaagcaatgatagggacttagggtgatagaagtgcaaagcatgactgtcaaatttttggagcaggttttctgacttcggtcggaaaacccctactttctggagtttcaaaaacagactgtacgccaagggtcatatctttttttgtattggtttgtgtcttggttggtgtcttaggtgttaatcctacagtggagggtttatgggaataggaagtaacatgtcgcctgcatgtcataggagaaaaagcgagcatcagccgtatcggctttgtaacacaaattagctatcgtgaagtccgctcagctcttccctttctaccctggctgctttttgcagggattggtccgtggtctccagtctcttgggttctcaccctgtgtgaaaatcttcgtgtttttccctaccccccagtcacctcttacacagcctctgcttccaagcgcagcccccacaggagtttgtaggatttctgtgctagcggggaatgtgttctcacctcatagagccaggtagaaattatgcagatgggcagttctctgggaagaaagcagggcctttggggctctcagtgtccccgttgggttgtagaca

SEQ ID NO: 681 - DNA, 1087 bp, synthetic construct
  source 1..1087: mol_type = other DNA
agtccttgctcttaactactgaaccaactctcccgtcctataagtaaattttcagagcactaatctattctacttcaagtttctcctgcatcagatccaggccagctggagcgagctacacggttaccccccctcctcccaaaggggaaaataaggatcaggtgaaaatgtttggaaattacaatagtagaatataaagaaagaatatgaaggcggccatgaaggggtagaaaggtagatgaccaggcgtcatccctgatgtcacgggtatgggcgtggtgtatgcagataagcgcgcagggtctgccgggtccgcgctccgtgcagaaatgtgaggggtttctcccgcggcgagggagggagcgcggatacgcgggtgtcagcagagcgcaagaatgtcgtgtgcgacgagggagacccgagatcggccagggctaagtgaccgtgtgttaagagtgtagaggcgacgggtgtgagccggggccgggcagtgggaaagcaatgatagggacttagggtgatagaagtgcaaagcatgactgtcaaatttttggagcaggttttctgacttcggtcggaaaacccctactttctggagtttctaaaagtagactgtacgctaagggtcatatctttttttgttttggtttgtgtcttggttggcgtcttaaatgttaatcctacagtggagggctggcgaataggaagtaacatgtcgcctgcacgccataggagaaaaagcgagcatcagccgtatcggctttgtaacacaaattagctatcgtgaagtccgctcagctcttccctttctaccctggctgctttttgcagggattggtccgtggtctccagtctcttgggttctcaccctgtgtgaaaatcttcctgtttttccctaccccccaagtcacctcttacacagcctctgcttccaagcgcagcccccacaggagtttgtaggatttctgtgctagcggggagtgtgttctcacctcatagagccaggtagaaactacgcagatgggtgctgttctccaggaagaaagcagggcctttggggctctcagtgtccccgttgggttgtaga

SEQ ID NO: 682 - DNA, 1087 bp, synthetic construct
  source 1..1087: mol_type = other DNA
agtccttgctcttaactactgaaccaactctcccgtcctataagtaaattttcagagcactaatctattctacttcaagtttctcctgcatcagatccaggccagctggagcgagctacacggttaccccccctcctcccaaaggggaaaataaggatcaggtgaaaatgtttggaaattacaatagtagaatataaagaaagaatatgaaggcggccatgaaggggtagaaaggtagatgaccaggcgtcatccctgatgtcacgggtatgggcgtggtgtatgcagataagcgcgcagggtctgccgggtccgcgctccgtgcagaaatgtgaggggtttctcccgcggcgagggagggagcgcggatacgcgggtgtcagcagagcgcaagaatgtcgtgtgcgacgagggagacccgagatcggccagggctaagtgaccgtgtgttaagagtgtagaggcgacgggtgtgagccggggccgggcagtgggaaagcaatgatagggacttagggtgatagaagtgcaaagcatgactgtcaaatttttggagcaggttttctgacttcggtcggaaaacccctactttctggagtttcaaaaacagaccgtacgccaagggtcatgtcttttttcgtattggtttgtgtcttagttgttaatcctacagtggaggcctggggaataagaagtaacatgtggcctgcacgccataggagaaaaagcgagcatcagccgtatcggctttgtaacacaaattagctatcgtgaagtccgctcagctcttccatttctaccctggctgctttttgcagggattggtccgtggtctccagtctcttgggttctcaccctgtgtgaaaatcttcgtgtttttccctaccccccaagtcacctcttacacagcctctgcttccaagcgcagcccccacaggagtttgtaggatttctgtgctagcggggagtgtgttctcacctcatagagccaggtagaaattatgcagatgggcgctgttctctgggaagaaagcagggcctttggggctctcagtgtccccgttgggttgtagacataacactctta

SEQ ID NO: 683 - DNA, 891 bp, synthetic construct
  source 1..891: mol_type = other DNA
agtccttgctcttaactactgaaccaactctcccgtcctataagtaaattttcagagcactaatctattctacttcaagtttctcctgcatcagatccaggccagctggagcgagctacacggttaccccccctcctcccaaaggggaaaataaggatcaggtgaaaatgtttggaaattacaatagtagaatataaagaaagaatatgaaggcggccatgaaggggtagaaaggtagatgaccaggcgtcatccctgatgtcacgggtatgggcgtggtgtatgcagataagcgcgcagggtctgccgggtccgcgctccgtgcagaaatgtgaggggtttctcccgcggcgagggagggagcgcggatacgcgggtgtcagcagagcgcaagaatgtcgtgtgcgacgagggagacccgagatcggccagggctaagtgaccgtgtgttaagagtgtagaggcgacgggtgtgagccggggccgggcagtgggaaagcaatgatagggacttagggtgatagaagtgcaaagcatgactgtcaaatttttggagcaggttttctgacttcggtcggaaaacccctcctccggggatacaacgtgtttcctaaaagtagagggaggtaagagacggtagcacctgcggggcggcttgcacgccgagtgcctgtgacgcgccggcttaacttaactgcttccctgaagtaccttgaggttcctgatgtgcgggcggtagacggtaggcttatgcggcacgctgtcgtttccaccgtggctactgcgctttgggaaggccacgacctcctcctttggggaggtccttaggatctcagcttggcagtcgagtgggtggcgaccttttaaaggaatgggacccacccggagttc

SEQ ID NO: 684 - DNA, 1079 bp, synthetic construct
  source 1..1079: mol_type = other DNA
agtccttgctcttaactactgaaccaactctcccgtcctataagtaaattttcagagcactaatctattctacttcaagtttctcctgcatcagatccaggccagctggagcgagctacacggttaccccccctcctcccaaaggggaaaataaggatcaggtgaaaatgtttggaaattacaatagtagaatataaagaaagaatatgaaggcggccatgaaggggtagaaaggtagatgaccaggcgtcatccctgatgtcacgggtatgggcgtggtgtatgcagataagcgcgcagggtctgccgggtccgcgctccgtgcagaaatgtgaggggtttctcccgcggcgagggagggagcgcggatacgcgggtgtcagcagagcgcaagaatgtcgtgtgcgacgagggagacccgagatcggccagggctaagtgaccgtgtgttaagagtgtagaggcgacgggtgtgagccggggccgggcagtgggaaagcaatgatagggacttagggtgatagaagtgcaaagcatgactgtcaaatttttggagcaggttttctgacttcggtcggaaaacccctttcccttcttgtaatacaaaataataacaaccacagaggacatcgcaagtaaaatgtgtataacaaccccatctaaagaaccctatcatctttctactatctgtctacctaaatatgtatagtataaataaccctatatagcactctaagcaacttaagttaggtaacttagaaaactcttttttttttttgagactgagtctcactctgtcgcacccaggctggagtgcagtggcgtgatctcggctcactgcaacctccaccttctgggttcaagtgattctcccatctcagtctcccaagtagctgggattacaggcacgccaccatgccctgctacatttttttttttttagtagagatgaggtttcaccacattggccaggctgttctcgaactcctgacctcaggtgatccgcccaccttggcctcatgaagtgctgggattacaggtgtgagccactgtacccagccagaaaactcttaaaaaac

SEQ ID NO: 685 - DNA, 969 bp, synthetic construct
  source 1..969: mol_type = other DNA
agtccttgctcttaactactgaaccaactctcccgtcctataagtaaattttcagagcactaatctattctacttcaagtttctcctgcatcagatccaggccagctggagcgagctacacggttaccccccctcctcccaaaggggaaaataaggatcaggtgaaaatgtttggaaattacaatagtagaatataaagaaagaatatgaaggcggccatgaaggggtagaaaggtagatgaccaggcgtcatccctgatgtcacgggtatgggcgtggtgtatgcagataagcgcgcagggtctgccgggtccgcgctccgtgcagaaatgtgaggggtttctcccgcggcgagggagggagcgcggatacgcgggtgtcagcagagcgcaagaatgtcgtgtgcgacgagggagacccgagatcggccagggctaagtgaccgtgtgttaagagtgtagaggcgacgggtgtgagccggggccgggcagtgggaaagcaatgatagggacttagggtgatagaagtgcaaagcatgactgtcaaatttttggagcaggttttctgacttcggtcggaaaacccctctgaattttcttgcagttgaacaacagaggctttttttgtgtgtgtgggggtgcttggttttgggaggttgaagagtacttgttcgcaaactctctaaatgagagatggggaagtgtcttaccagctgattcgcgagagcacctgcaagtttacctgttttagtgatttgcgtttatgaaagttggagttgctgattttgtgatctctacttttaaggtaaaagcagggcggtgttgacttttcttgccagttggctgtcctgttttctttctcgcactgttttctttttgagacgaagtctgtcgctcaggctggagtgcactggcgtgatctcggctcgctgcaaactttgccgaacccctgtttagcgatttccgtttg

SEQ ID NO: 686 - DNA, 1087 bp, synthetic construct
  source 1..1087: mol_type = other DNA
agtccttgctcttaactactgaaccaactctcccgtcctataagtaaattttcagagcactaatctattctacttcaagtttctcctgcatcagatccaggccagctggagcgagctacacggttaccccccctcctcccaaaggggaaaataaggatcaggtgaaaatgtttggaaattacaatagtagaatataaagaaagaatatgaaggcggccatgaaggggtagaaaggtagatgaccaggcgtcatccctgatgtcacgggtatgggcgtggtgtatgcagataagcgcgcagggtctgccgggtccgcgctccgtgcagaaatgtgaggggtttctcccgcggcgagggagggagcgcggatacgcgggtgtcagcagagcgcaagaatgtcgtgtgcgacgagggagacccgagatcggccagggctaagtgaccgtgtgttaagagtgtagaggcgacgggtgtgagccggggccgggcagtgggaaagcaatgatagggacttagggtgatagaagtgcaaagcatgactgtcaaatttttggagcaggttttctgacttcggtcggaaaacccctatatgtggtaatccaacaatagaaattatttttaagtttgtgtgttcctttttctgttcaatggtgcttttgatattgttgtaaagcagtgactagcagattctgtgtggtaaaagcactgaaccctgtttagttcttttctccctaccttattggtaattatttctgtgtatatatgttccaaagaaatgcggcttgtatattcatgcttttcaactttttgtgatagacagttgatacacaagtagtacctcctccgggatcttcttagtcaagactgtttggtagatgcatgttttttgttacttgtaatgtacagtattcagttcattttctttttgcagcactgtccggttgaaacacaacgcgaggatcgggcgtggtggctcacgcctgtaatcccagcactttgggaggccgaggcaggacaatcaagaccaatcctggtcatcaaggcaggagaatcaagaccatcgaggtcaggagatcaagaccatcct

SEQ ID NO: 687 - DNA, 1085 bp, synthetic construct
  source 1..1085: mol_type = other DNA
agtccttgctcttaactactgaaccaactctcccgtcctataagtaaattttcagagcactaatctattctacttcaagtttctcctgcatcagatccaggccagctggagcgagctacacggttaccccccctcctcccaaaggggaaaataaggatcaggtgaaaatgtttggaaattacaatagtagaatataaagaaagaatatgaaggcggccatgaaggggtagaaaggtagatgaccaggcgtcatccctgatgtcacgggtatgggcgtggtgtatgcagataagcgcgcagggtctgccgggtccgcgctccgtgcagaaatgtgaggggtttctcccgcggcgagggagggagcgcggatacgcgggtgtcagcagagcgcaagaatgtcgtgtgcgacgagggagacccgagatcggccagggctaagtgaccgtgtgttaagagtgtagaggcgacgggtgtgagccggggccgggcagtgggaaagcaatgatagggacttagggtgatagaagtgcaaagcatgactgtcaaatttttggagcaggttttctgacttcggtcggaaaacccctacatcaggttgtttttctgtttttacatcaggttgtttttctgtttggttttttttttacaccacgtttatacgccggtgcacggtttaccactgaaaacacctttcatctacaggtgatatcttttaacacaaataaaatgtagtagtcctaggagacggaatagaaggaggtggggcctaggcagattcatctctgcggtgcattttgcctctggccctcgggccctagtttgcgatctttcccatcttgcctctgcttccctctgcacaatcctgagtattgcagtaccttacacttaaggaaatttcgtcttgccaaagttgatccatttcagctccgaaacataacaggaactagtgcaacgataaacgtatgaggaacttgcaataagagtgacagaatcctttgaatcaaaaaaaaaaaaagccaccacttaatgagtatctaccatatgtcaagggcttcaccaatatttcattgaaatattccagacca

SEQ ID NO: 688 - DNA, 1087 bp, synthetic construct
  source 1..1087: mol_type = other DNA
agtccttgctcttaactactgaaccaactctcccgtcctataagtaaattttcagagcactaatctattctacttcaagtttctcctgcatcagatccaggccagctggagcgagctacacggttaccccccctcctcccaaaggggaaaataaggatcaggtgaaaatgtttggaaattacaatagtagaatataaagaaagaatatgaaggcggccatgaaggggtagaaaggtagatgaccaggcgtcatccctgatgtcacgggtatgggcgtggtgtatgcagataagcgcgcagggtctgccgggtccgcgctccgtgcagaaatgtgaggggtttctcccgcggcgagggagggagcgcggatacgcgggtgtcagcagagcgcaagaatgtcgtgtgcgacgagggagacccgagatcggccagggctaagtgaccgtgtgttaagagtgtagaggcgacgggtgtgagccggggccgggcagtgggaaagcaatgatagggacttagggtgatagaagtgcaaagcatgactgtcaaatttttggagcaggttttctgacttcggtcggaaaacccctcttatgatgtttgttgccaatgatagattgttttcactgtgcaaaaattatgggtagttttggtggtcttgatgcagttgtaagcttggggtatgaaggtttgggccacgcctgggcgcttccggctgcgccggatgctgtttcctttccgctcccaggggcgttgggaacggttgtaggacgtggctctttattcgtgagttttccatttacctccgctgaacctagagcttcagacgccctatggcgtccgcctcgacccaaccggcggccttgagcgctgagcaagcaaagggtgagaatcgtcctagtcaaggcataggctgctggcctggggtagtcaaggcatgggctgctggtctggggaggatgcgggcggaggatgtggggcgacaaacctggctacgtccgccgggaaaatggggtaggggacgccgggtaccgtccttctaagtggggcgcttgcccccaagacttgggatcttattgggttacctaca

SEQ ID NO: 689 - DNA, 1085 bp, synthetic construct
  source 1..1085: mol_type = other DNA
agtccttgctcttaactactgaaccaactctcccgtcctataagtaaattttcagagcactaatctattctacttcaagtttctcctgcatcagatccaggccagctggagcgagctacacggttaccccccctcctcccaaaggggaaaataaggatcaggtgaaaatgtttggaaattacaatagtagaatataaagaaagaatatgaaggcggccatgaaggggtagaaaggtagatgaccaggcgtcatccctgatgtcacgggtatgggcgtggtgtatgcagataagcgcgcagggtctgccgggtccgcgctccgtgcagaaatgtgaggggtttctcccgcggcgagggagggagcgcggatacgcgggtgtcagcagagcgcaagaatgtcgtgtgcgacgagggagacccgagatcggccagggctaagtgaccgtgtgttaagagtgtagaggcgacgggtgtgagccggggccgggcagtgggaaagcaatgatagggacttagggtgatagaagtgcaaagcatgactgtcaaatttttggagcaggttttctgacttcggtcggaaaaccccttctttactgttatatgttaggcgaaatattacgcgtttggagtaagtggtgctttttgtaactgaaaagagattctgtgtgtgtttttttttttttagaggctgcatagttatttgtatgaaccgcaggtgacctaattagcaaggtaattcagacctgtatcctagcacttaagaagtggaagtgggataaccctgcgtgttctcgtgtgggaggctagcttaagcaacaaagcaggaaggccccaccaacaaaagaatttaaaaattatacgtgcgtggtggcgcgcgtatgaggaaattatttggcaactgtgttacagtatagcagcaaatggaatagacctagtccctgactttaggagacctgcctcagccccccgaatggctgggactacaggcgtgcgcctccgcgcccagctaatttttgcatttttggtagagacgggttcaccatgttggccaggatggtctccatctcttcatctggtgatccgcc

SEQ ID NO: 690 - DNA, 1087 bp, synthetic construct
  source 1..1087: mol_type = other DNA
agtccttgctcttaactactgaaccaactctcccgtcctataagtaaattttcagagcactaatctattctacttcaagtttctcctgcatcagatccaggccagctggagcgagctacacggttaccccccctcctcccaaaggggaaaataaggatcaggtgaaaatgtttggaaattacaatagtagaatataaagaaagaatatgaaggcggccatgaaggggtagaaaggtagatgaccaggcgtcatccctgatgtcacgggtatgggcgtggtgtatgcagataagcgcgcagggtctgccgggtccgcgctccgtgcagaaatgtgaggggtttctcccgcggcgagggagggagcgcggatacgcgggtgtcagcagagcgcaagaatgtcgtgtgcgacgagggagacccgagatcggccagggctaagtgaccgtgtgttaagagtgtagaggcgacgggtgtgagccggggccgggcagtgggaaagcaatgatagggacttagggtgatagaagtgcaaagcatgactgtcaaatttttggagcaggttttctgacttcggtcggaaaacccctaccttattcacgcctaaaaagtagactgactgtggggtggtcgtgttttttgtttcttgttggtaggtggtgaatgcgtttttttcgttgttttctccgttactcaggctgccagttgcttggcagtcttgtcgctggctgtggacgctctgcacttcatcaccgtccccagctgcgctttgagccggtctaaggttgcccacagtattgacgttgggacccacgaaactggcaatttccatgtgtgcggccttacccagttctcccaaacttctgcgtataaccgcttctctgtgcttcagaaagataagtccggccccggcctcacacagcagctcagttcgtgacagcgtttaatatgtaaaatggagcaaataatttatagggcgttgggagagttaaagagactaattcatttacgtgttaaatacagggaatggcttttgcattgatataaccccagcctccagcatgcgccagacctgacgtaggtgttcggc

SEQ ID NO: 691 - DNA, 1087 bp, synthetic construct
  source 1..1087: mol_type = other DNA
agtccttgctcttaactactgaaccaactctcccgtcctataagtaaattttcagagcactaatctattctacttcaagtttctcctgcatcagatccaggccagctggagcgagctacacggttaccccccctcctcccaaaggggaaaataaggatcaggtgaaaatgtttggaaattacaatagtagaatataaagaaagaatatgaaggcggccatgaaggggtagaaaggtagatgaccaggcgtcatccctgatgtcacgggtatgggcgtggtgtatgcagataagcgcgcagggtctgccgggtccgcgctccgtgcagaaatgtgaggggtttctcccgcggcgagggagggagcgcggatacgcgggtgtcagcagagcgcaagaatgtcgtgtgcgacgagggagacccgagatcggccagggctaagtgaccgtgtgttaagagtgtagaggcgacgggtgtgagccggggccgggcagtgggaaagcaatgatagggacttagggtgatagaagtgcaaagcatgactgtcaaatttttggagcaggttttctgacttcggtcggaaaaccccttttgacccattacccatctaagttagatgcttttttaaatgttttttaatttttaaatttttaatttttttcattatttattttttatttttgagacggatctcggctcactgtaacctccacctcccgggttcaagcgattctcctgactcagcctcccgagtagctgggattacaggcgcgcgccaccatgcccggctaatttttctatttttagtaaagacggggtttcgccatgttgaccagggtggtcttgaactcctgacgtcaggtgatcctcctgcctcgtgctgggattgcaggcgtgagccaccgctcccggcccttagatgctttttaatcagcaagtacgcaatgctttcctgacaggaatgtcaagtccgtcaggaaatccacataagggtgttaagcaggcaaagtaccacatacagattaaaatcaaaagcactgtcaacgcttatttaatttatacagtagaccctaacttttctaattttgtg

SEQ ID NO: 692 - DNA, 1087 bp, synthetic construct
  source 1..1087: mol_type = other DNA
agtccttgctcttaactactgaaccaactctcccgtcctataagtaaattttcagagcactaatctattctacttcaagtttctcctgcatcagatccaggccagctggagcgagctacacggttaccccccctcctcccaaaggggaaaataaggatcaggtgaaaatgtttggaaattacaatagtagaatataaagaaagaatatgaaggcggccatgaaggggtagaaaggtagatgaccaggcgtcatccctgatgtcacgggtatgggcgtggtgtatgcagataagcgcgcagggtctgccgggtccgcgctccgtgcagaaatgtgaggggtttctcccgcggcgagggagggagcgcggatacgcgggtgtcagcagagcgcaagaatgtcgtgtgcgacgagggagacccgagatcggccagggctaagtgaccgtgtgttaagagtgtagaggcgacgggtgtgagccggggccgggcagtgggaaagcaatgatagggacttagggtgatagaagtgcaaagcatgactgtcaaatttttggagcaggttttctgacttcggtcggaaaacccctgtttacttggttttaaaaatagcttgcactagcgataccgcgaatatggttattaggtttgttaggcacagtcgtgtcttactatagaaaaataacgtagtgttcattttgctgcctgtatgtgttaatttgtccttattgcgccattgttcttgttaagtcttctgtaaggagttgcgggtttcaaactgtcagtctgagagcataagctcacttttcagtcagttgaattgaatgttacattcgattggttctggatattgatattacccaaggcttgtcctgtttgtaagtcttttcctacacctgacaatatgattatgtttacaatgtccctagaactctgggtgtatcgttcccactgaataaaatttgatctctaagttgacctataaatttaagtaccaaaaaactggtttgtaagattttggaaggcagaggcagggaagagaccaacgtggtctacatataaagtaccaggtacatataaagtaccaggt

SEQ ID NO: 693 - DNA, 1083 bp, synthetic construct
  source 1..1083: mol_type = other DNA
agtccttgctcttaactactgaaccaactctcccgtcctataagtaaattttcagagcactaatctattctacttcaagtttctcctgcatcagatccaggccagctggagcgagctacacggttaccccccctcctcccaaaggggaaaataaggatcaggtgaaaatgtttggaaattacaatagtagaatataaagaaagaatatgaaggcggccatgaaggggtagaaaggtagatgaccaggcgtcatccctgatgtcacgggtatgggcgtggtgtatgcagataagcgcgcagggtctgccgggtccgcgctccgtgcagaaatgtgaggggtttctcccgcggcgagggagggagcgcggatacgcgggtgtcagcagagcgcaagaatgtcgtgtgcgacgagggagacccgagatcggccagggctaagtgaccgtgtgttaagagtgtagaggcgacgggtgtgagccggggccgggcagtgggaaagcaatgatagggacttagggtgatagaagtgcaaagcatgactgtcaaatttttggagcaggttttctgacttcggtcggaaaacccctatttttgtggtgctaaaagttagattgcattccgcccttctcacgtctctttacgtgttgtttgcgaggcgtggcctcggaggtaaatggtctccttttacctcagataagcttacctttgctctgtgagtaagaatgtagctacacttccaaatttagctattgtcctttgcggtccaaatgaaaatattaccttccgatctaacaatgttaaactagtcccaggcccttctatcgattgccagaatagactagactactacacagacacaccctctcaaatcaggccagctcctgcaacctgcacctacagtttgtcccctgggacaaatgaaaggacaggccctctttcccccccccccccaaatcagagcacacacagatcttggggtctggggcagaaatttcgttcatggaaaaaacaaacaaacaaacaaacacgatcaaaggaagctcgttccctttggcctcagggtttcttagacgccgtgttccc

SEQ ID NO: 694 - DNA, 1084 bp, synthetic construct
  source 1..1084: mol_type = other DNA
agtccttgctcttaactactgaaccaactctcccgtcctataagtaaattttcagagcactaatctattctacttcaagtttctcctgcatcagatccaggccagctggagcgagctacacggttaccccccctcctcccaaaggggaaaataaggatcaggtgaaaatgtttggaaattacaatagtagaatataaagaaagaatatgaaggcggccatgaaggggtagaaaggtagatgaccaggcgtcatccctgatgtcacgggtatgggcgtggtgtatgcagataagcgcgcagggtctgccgggtccgcgctccgtgcagaaatgtgaggggtttctcccgcggcgagggagggagcgcggatacgcgggtgtcagcagagcgcaagaatgtcgtgtgcgacgagggagacccgagatcggccagggctaagtgaccgtgtgttaagagtgtagaggcgacgggtgtgagccggggccgggcagtgggaaagcaatgatagggacttagggtgatagaagtgcaaagcatgactgtcaaatttttggagcaggttttctgacttcggtcggaaaacccctataactggtaaccaaaagcagattactttcccccttgtggtcttcgcgtttgcggacgggagagaactttcggccattttccttttagaaatttaacttcttgaaggccaccaggtgacccttacttccctctcacctttccttctacctgtactttctctattaaaaagcctgcagaagtacccttgacaaattgccaaaaatgacacctaaaaaaaaaaaaaggaaaaacgacaccttaggtaattataggttgtaagaaaaagatttgacctcttggagtttttatttcttaataccaaaggacacccaaggaacgtatctctcaaaattgggtttcaaacctcagccgtttccttcttagttccagtgcttaacacgcaacagacctgcacaccactacactgcatacgagttttaaagttaataaatcagtcacccctccatagtcttctacctacttgaagacagaaacggctgctaggaagcaattcttc

SEQ ID NO: 695 - DNA, 1087 bp, synthetic construct
  source 1..1087: mol_type = other DNA
agtccttgctcttaactactgaaccaactctcccgtcctataagtaaattttcagagcactaatctattctacttcaagtttctcctgcatcagatccaggccagctggagcgagctacacggttaccccccctcctcccaaaggggaaaataaggatcaggtgaaaatgtttggaaattacaatagtagaatataaagaaagaatatgaaggcggccatgaaggggtagaaaggtagatgaccaggcgtcatccctgatgtcacgggtatgggcgtggtgtatgcagataagcgcgcagggtctgccgggtccgcgctccgtgcagaaatgtgaggggtttctcccgcggcgagggagggagcgcggatacgcgggtgtcagcagagcgcaagaatgtcgtgtgcgacgagggagacccgagatcggccagggctaagtgaccgtgtgttaagagtgtagaggcgacgggtgtgagccggggccgggcagtgggaaagcaatgatagggacttagggtgatagaagtgcaaagcatgactgtcaaatttttggagcaggttttctgacttcggtcggaaaacccctctggggaataagagtggtttaaagaaagaacaatttgagagatctgcttagatctaataaaacccaagtatagtttctttagacgtcttatatctcacgtaggacctcttatttcagactcactgcaagaacaagctaaagaactatatacagtcaggaacaaggtgagccatcgcggttctcagtcccatgatcttaagagtttttcctcttcccctcttccctggctgtcctggagctcactctgtagaccaggctggtctcaaactcagaaatccacttacctctgcctcccaagggctgggattaaaggcatgcaccaccattgcccggcagggtatgtggactatgctgtccttcaactcagagatcgtggtactttaaatctcattttccgaaagaaaagaaaagaaaggaaggggggaaataaagccagtatattttgcacccacaatctgaagttctacaaatattgttagaaaatgcaaaggacccaagtc

SEQ ID NO: 696 - DNA, 1087 bp, synthetic construct
  source 1..1087: mol_type = other DNA
agtccttgctcttaactactgaaccaactctcccgtcctataagtaaattttcagagcactaatctattctacttcaagtttctcctgcatcagatccaggccagctggagcgagctacacggttaccccccctcctcccaaaggggaaaataaggatcaggtgaaaatgtttggaaattacaatagtagaatataaagaaagaatatgaaggcggccatgaaggggtagaaaggtagatgaccaggcgtcatccctgatgtcacgggtatgggcgtggtgtatgcagataagcgcgcagggtctgccgggtccgcgctccgtgcagaaatgtgaggggtttctcccgcggcgagggagggagcgcggatacgcgggtgtcagcagagcgcaagaatgtcgtgtgcgacgagggagacccgagatcggccagggctaagtgaccgtgtgttaagagtgtagaggcgacgggtgtgagccggggccgggcagtgggaaagcaatgatagggacttagggtgatagaagtgcaaagcatgactgtcaaatttttggagcaggttttctgacttcggtcggaaaacccctctcggtttatcttaaagggttttaaatatagaaagcttccttagtcttatgggtgagagtgctgtttaagccttacctaggtatgtctttgaacatttattacagattgttatttgtgactatgaccactcaggtgttctgttcttgtgaatttagacacactcagaaaggctacacactcaaagaccacaccaaagtgaagtactatctgggccgtgaaactggtcacatatcagttattttgcagtaaaacaaggaagtcaatcatactgcttcagtgggtcagggagtcaagaatgcacagtacaagagctggtgagattcctcagcaggtaagagcactgaatgctcttccaaagattctgagttcaaatcccagcaaccacgtggtggatttgaacaaaggatgaaaacaaccatccataaccagatctgatgccctcttctggagtgtcaaaagacagctatggtgtacttacataaataaataagtaaaaaca

SEQ ID NO: 697 - DNA, 1087 bp, synthetic construct
  source 1..1087: mol_type = other DNA
agtccttgctcttaactactgaaccaactctcccgtcctataagtaaattttcagagcactaatctattctacttcaagtttctcctgcatcagatccaggccagctggagcgagctacacggttaccccccctcctcccaaaggggaaaataaggatcaggtgaaaatgtttggaaattacaatagtagaatataaagaaagaatatgaaggcggccatgaaggggtagaaaggtagatgaccaggcgtcatccctgatgtcacgggtatgggcgtggtgtatgcagataagcgcgcagggtctgccgggtccgcgctccgtgcagaaatgtgaggggtttctcccgcggcgagggagggagcgcggatacgcgggtgtcagcagagcgcaagaatgtcgtgtgcgacgagggagacccgagatcggccagggctaagtgaccgtgtgttaagagtgtagaggcgacgggtgtgagccggggccgggcagtgggaaagcaatgatagggacttagggtgatagaagtgcaaagcatgactgtcaaatttttggagcaggttttctgacttcggtcggaaaacccctccacattttgtgtttaaaaatagaaatatttaagtgagatcagtttaaatctgctttatctagggtgtctaactgcttgcatctttttaacttttccttatttgtgagaaggtctgtaaaacttattatatgttagtacactgtagctgtcttcagacactccagaagagggattcagatcaccttacagatggttttgagccaccatgtggttgctgggatttgaactcaggacctttagaaaagtagttgggtgctcttacccgctgagccatctcaccagccctttttttttcttttttccagttcgggtttctctgtgtgtagccctggctgtcctggaactcattctgtagaccgggctggcctcgaactcagaaatctgcctgcctctgcctcccaagtgctgggattaaaggaatgtgccttcattgcccggctctagggctttttgttgttgtttgtttgtttgtttgtttgtttgcttttgtggatggcct

SEQ ID NO: 698 - DNA, 1087 bp, synthetic construct
  source 1..1087: mol_type = other DNA
agtccttgctcttaactactgaaccaactctcccgtcctataagtaaattttcagagcactaatctattctacttcaagtttctcctgcatcagatccaggccagctggagcgagctacacggttaccccccctcctcccaaaggggaaaataaggatcaggtgaaaatgtttggaaattacaatagtagaatataaagaaagaatatgaaggcggccatgaaggggtagaaaggtagatgaccaggcgtcatccctgatgtcacgggtatgggcgtggtgtatgcagataagcgcgcagggtctgccgggtccgcgctccgtgcagaaatgtgaggggtttctcccgcggcgagggagggagcgcggatacgcgggtgtcagcagagcgcaagaatgtcgtgtgcgacgagggagacccgagatcggccagggctaagtgaccgtgtgttaagagtgtagaggcgacgggtgtgagccggggccgggcagtgggaaagcaatgatagggacttagggtgatagaagtgcaaagcatgactgtcaaatttttggagcaggttttctgacttcggtcggaaaacccctaaaaccagtaagggagaaaggtcaagtaacatataaaggaaggcctatcagaattacaccagacttttcaccagagactatgaaagccagaagagcctggacagatgttatacagacactaagagaacacaaatgccagcccaggctactatacctggccaaactctcaattaccatagatggagaaaccaaagtattccacgacaaaaacaaattcacacaatatctttccacgaatccagcccttcaaaggataatgacagaaaagaagcaatacaaggacggaaatcacgccctagaacaaccaagaaactaatcattcaacaaaccaaaaagaagacagccacaagaacagaatgccaactctaacaacaaaaataaaaggaagcaacaattacttttccttaatatctcttaatatcaatggactcaattccccaataaaaagacatagactaacagactggctacacaaacaggacccaacattctgctgctta

SEQ ID NO: 699 - DNA, 1087 bp, synthetic construct
  source 1..1087: mol_type = other DNA
agtccttgctcttaactactgaaccaactctcccgtcctataagtaaattttcagagcactaatctattctacttcaagtttctcctgcatcagatccaggccagctggagcgagctacacggttaccccccctcctcccaaaggggaaaataaggatcaggtgaaaatgtttggaaattacaatagtagaatataaagaaagaatatgaaggcggccatgaaggggtagaaaggtagatgaccaggcgtcatccctgatgtcacgggtatgggcgtggtgtatgcagataagcgcgcagggtctgccgggtccgcgctccgtgcagaaatgtgaggggtttctcccgcggcgagggagggagcgcggatacgcgggtgtcagcagagcgcaagaatgtcgtgtgcgacgagggagacccgagatcggccagggctaagtgaccgtgtgttaagagtgtagaggcgacgggtgtgagccggggccgggcagtgggaaagcaatgatagggacttagggtgatagaagtgcaaagcatgactgtcaaatttttggagcaggttttctgacttcggtcggaaaacccctcccaatttcactggtctacaatgaaagcaaaacagttctcttccccgctccccggtgtgtgagaggggctttgatccttctctggtttcctaggaaacgcgtatgtgctagagccacgctctgagacttccgcctcgtgcggtcccgcttcctttctgcctcctctggcctgcatccgtgggggaggtggctggctgcagggttctccggatctcttctgtgttcccactactcaagcaccgagtggcgttctatggcgtccgcctcggctcagcccgcggccctgagcgcggagcaggccaagggtgaggaaagagcctagtctgggtgtgggccgtcttctggggggagggcgcgatactattctttgcctctccaagtggggcccttgcccattagggcgaagggttgggaggacaagcttatcgggttgcttgcaggcctcggcccactaattccctgcctcttccctcctctgggctcgcccgccgtcctccgcg

SEQ ID NO: 700 - DNA, 1087 bp, synthetic construct
  source 1..1087: mol_type = other DNA
agtccttgctcttaactactgaaccaactctcccgtcctataagtaaattttcagagcactaatctattctacttcaagtttctcctgcatcagatccaggccagctggagcgagctacacggttaccccccctcctcccaaaggggaaaataaggatcaggtgaaaatgtttggaaattacaatagtagaatataaagaaagaatatgaaggcggccatgaaggggtagaaaggtagatgaccaggcgtcatccctgatgtcacgggtatgggcgtggtgtatgcagataagcgcgcagggtctgccgggtccgcgctccgtgcagaaatgtgaggggtttctcccgcggcgagggagggagcgcggatacgcgggtgtcagcagagcgcaagaatgtcgtgtgcgacgagggagacccgagatcggccagggctaagtgaccgtgtgttaagagtgtagaggcgacgggtgtgagccggggccgggcagtgggaaagcaatgatagggacttagggtgatagaagtgcaaagcatgactgtcaaatttttggagcaggttttctgacttcggtcggaaaacccctgaatttgttaaattacaggaggaagcttttttagttcattttacaaatactttcttgttaggtagataataccttctaaggttattatctggatcttctaagtctttttatcgctagcaagtctaagtttctggactttggaattagaagttaatgtcgtaggcgggcatggtggtccacgcctttaatcccagagtttgggaggcagacgcaggtggttttctgagttcgaggccatcctgctcttcaatgttagttccaggacagccagggttatacaaagaaaccctgtctcgagaaacaaaacaaacaaaaaaagagtagctgagtgctctgagttgtctctccagccccttagctatttattttcatttaaattatttttgttttattcgcttgtgtgcctgagtttgaatttcccgggattaacagttgaagactagggctggtgagatggctcagcggttaagattgccgactgctcttccaaaggtcctgag

SEQ ID NO: 701 - DNA, 1087 bp, synthetic construct
  source 1..1087: mol_type = other DNA
agtccttgctcttaactactgaaccaactctcccgtcctataagtaaattttcagagcactaatctattctacttcaagtttctcctgcatcagatccaggccagctggagcgagctacacggttaccccccctcctcccaaaggggaaaataaggatcaggtgaaaatgtttggaaattacaatagtagaatataaagaaagaatatgaaggcggccatgaaggggtagaaaggtagatgaccaggcgtcatccctgatgtcacgggtatgggcgtggtgtatgcagataagcgcgcagggtctgccgggtccgcgctccgtgcagaaatgtgaggggtttctcccgcggcgagggagggagcgcggatacgcgggtgtcagcagagcgcaagaatgtcgtgtgcgacgagggagacccgagatcggccagggctaagtgaccgtgtgttaagagtgtagaggcgacgggtgtgagccggggccgggcagtgggaaagcaatgatagggacttagggtgatagaagtgcaaagcatgactgtcaaatttttggagcaggttttctgacttcggtcggaaaacccctaccccctaattctacaagaatagaaagcttagcagctcctctgaatggttgctctcaggtgctagtggttgcaagtcgtatgttgatgcctgcctttgccctacctggtgtgtgagcgtgagcgcgccccacctctccagcctctctcttactgtttttcagacaagatgggactgttgttctcctactgctatgtacctcaatttcaattgatcatgcctggacataactgcccatgttgtaaggtcgtctacgttgtaaggtcgtgctcagtttctgatgcctagactagtcacctttccgtttgcctcctgactgtgtaaatgaggcaaatgaaggtggtctcttaactgacatgttagtgtttgacctatgggatagtttctcattgttgagacagaatttctagaagctggtccgctgagcggctaagagcacttgctgatattgcaaaggatctacctgggtttggttctcagcactcacatggaagttcacat

SEQ ID NO: 702 - DNA, 654 bp, synthetic construct
  source 1..654: mol_type = other DNA
agtccttgctcttaactactgaaccaactctcccgtcctataagtaaattttcagagcactaatctattctacttcaagtttctcctgcatcagatccaggccagctggagcgagctacacggttaccccccctcctcccaaaggggaaaataaggatcaggtgaaaatgtttggaaattacaatagtagaatataaagaaagaatatgaaggcggccatgaaggggtagaaaggtagatgaccaggcgtcatccctgatgtcacgggtatgggcgtggtgtatgcagataagcgcgcagggtctgccgggtccgcgctccgtgcagaaatgtgaggggtttctcccgcggcgagggagggagcgcggatacgcgggtgtcagcagagcgcaagaatgtcgtgtgcgacgagggagacccgagatcggccagggctaagtgaccgtgtgttaagagtgtagaggcgacgggtgtgagccggggccgggcagtgggaaagcaatgatagggacttagggtgatagaagtgcaaagcatgactgtcaaatttttggagcaggttttctgacttcggtcggaaaaccccttgtagttcctgcaatttaattttcgtttaaaactttattttattctttaacttaaaaaaaatatata

SEQ ID NO: 703 - DNA, 1087 bp, synthetic construct
  source 1..1087: mol_type = other DNA
cggtggggctggctcctgtgctgcccgactcctgtgctccgacttggagaagacgggcgtccgttcgtccatacccaaaagagtcggccacaaggatgttggcacctgggggtgggccacgagcggccagttaggggtaagagacggtgcaaggtgacttgtccctggtccttcaccgctccagcactgcgccagtgagaaagtccaacaggccccgggatcgggcggcgaaaggaaggggcgtgatgtcactcctgggtggctgacggggcggggtgtatgcagatgagggtcgcgcaggggctgcggcgtccgcagcggccggggaaacgcgagagatttctcgcgcggcgtgggagagaacgcgggtcgccagatgtcagcggagcgccgagacggcgtgtgcgacgagggagacccgagatcgggcggggctaagtgaccgtgtgttaagagtgcaggggcggcgggtgtgagccggggccgggcgctgggagagcaatgatagggacttagggtgatagaagtgcaaagcatgactgtcaaatttttggagcaggttttctgacttcggtcggaaaacccctactttctggagtttcaaaaacagactgtacgccaagggtcatatctttttttgtattggtttgtgtcttggttggtgtcttaggtgttaatcctacagtggagggtttatgggaataggaagtaacatgtcgcctgcatgtcataggagaaaaagcgagcatcagccgtatcggctttgtaacacaaattagctatcgtgaagtccgctcagctcttccctttctaccctggctgctttttgcagggattggtccgtggtctccagtctcttgggttctcaccctgtgtgaaaatcttcgtgtttttccctaccccccagtcacctcttacacagcctctgcttccaagcgcagcccccacaggagtttgtaggatttctgtgctagcggggaatgtgttctcacctcatagagccaggtagaaattatgcagatgggcagttctctgggaagaaagcagggcctttggggctctcagtgtccccgttgggttgtagaca

SEQ ID NO: 704 - DNA, 1087 bp, synthetic construct
  source 1..1087: mol_type = other DNA
cggtggggctggctcctgtgctgcccgactcctgtgctccgacttggagaagacgggcgtccgttcgtccatacccaaaagagtcggccacaaggatgttggcacctgggggtgggccacgagcggccagttaggggtaagagacggtgcaaggtgacttgtccctggtccttcaccgctccagcactgcgccagtgagaaagtccaacaggccccgggatcgggcggcgaaaggaaggggcgtgatgtcactcctgggtggctgacggggcggggtgtatgcagatgagggtcgcgcaggggctgcggcgtccgcagcggccggggaaacgcgagagatttctcgcgcggcgtgggagagaacgcgggtcgccagatgtcagcggagcgccgagacggcgtgtgcgacgagggagacccgagatcgggcggggctaagtgaccgtgtgttaagagtgcaggggcggcgggtgtgagccggggccgggcgctgggagagcaatgatagggacttagggtgatagaagtgcaaagcatgactgtcaaatttttggagcaggttttctgacttcggtcggaaaacccctactttctggagtttctaaaagtagactgtacgctaagggtcatatctttttttgttttggtttgtgtcttggttggcgtcttaaatgttaatcctacagtggagggctggcgaataggaagtaacatgtcgcctgcacgccataggagaaaaagcgagcatcagccgtatcggctttgtaacacaaattagctatcgtgaagtccgctcagctcttccctttctaccctggctgctttttgcagggattggtccgtggtctccagtctcttgggttctcaccctgtgtgaaaatcttcctgtttttccctaccccccaagtcacctcttacacagcctctgcttccaagcgcagcccccacaggagtttgtaggatttctgtgctagcggggagtgtgttctcacctcatagagccaggtagaaactacgcagatgggtgctgttctccaggaagaaagcagggcctttggggctctcagtgtccccgttgggttgtaga

SEQ ID NO: 705 - DNA, 1087 bp, synthetic construct
  source 1..1087: mol_type = other DNA
cggtggggctggctcctgtgctgcccgactcctgtgctccgacttggagaagacgggcgtccgttcgtccatacccaaaagagtcggccacaaggatgttggcacctgggggtgggccacgagcggccagttaggggtaagagacggtgcaaggtgacttgtccctggtccttcaccgctccagcactgcgccagtgagaaagtccaacaggccccgggatcgggcggcgaaaggaaggggcgtgatgtcactcctgggtggctgacggggcggggtgtatgcagatgagggtcgcgcaggggctgcggcgtccgcagcggccggggaaacgcgagagatttctcgcgcggcgtgggagagaacgcgggtcgccagatgtcagcggagcgccgagacggcgtgtgcgacgagggagacccgagatcgggcggggctaagtgaccgtgtgttaagagtgcaggggcggcgggtgtgagccggggccgggcgctgggagagcaatgatagggacttagggtgatagaagtgcaaagcatgactgtcaaatttttggagcaggttttctgacttcggtcggaaaacccctactttctggagtttcaaaaacagaccgtacgccaagggtcatgtcttttttcgtattggtttgtgtcttagttgttaatcctacagtggaggcctggggaataagaagtaacatgtggcctgcacgccataggagaaaaagcgagcatcagccgtatcggctttgtaacacaaattagctatcgtgaagtccgctcagctcttccatttctaccctggctgctttttgcagggattggtccgtggtctccagtctcttgggttctcaccctgtgtgaaaatcttcgtgtttttccctaccccccaagtcacctcttacacagcctctgcttccaagcgcagcccccacaggagtttgtaggatttctgtgctagcggggagtgtgttctcacctcatagagccaggtagaaattatgcagatgggcgctgttctctgggaagaaagcagggcctttggggctctcagtgtccccgttgggttgtagacataacactctta

SEQ ID NO: 706 - DNA, 891 bp, synthetic construct
  source 1..891: mol_type = other DNA
cggtggggctggctcctgtgctgcccgactcctgtgctccgacttggagaagacgggcgtccgttcgtccatacccaaaagagtcggccacaaggatgttggcacctgggggtgggccacgagcggccagttaggggtaagagacggtgcaaggtgacttgtccctggtccttcaccgctccagcactgcgccagtgagaaagtccaacaggccccgggatcgggcggcgaaaggaaggggcgtgatgtcactcctgggtggctgacggggcggggtgtatgcagatgagggtcgcgcaggggctgcggcgtccgcagcggccggggaaacgcgagagatttctcgcgcggcgtgggagagaacgcgggtcgccagatgtcagcggagcgccgagacggcgtgtgcgacgagggagacccgagatcgggcggggctaagtgaccgtgtgttaagagtgcaggggcggcgggtgtgagccggggccgggcgctgggagagcaatgatagggacttagggtgatagaagtgcaaagcatgactgtcaaatttttggagcaggttttctgacttcggtcggaaaacccctcctccggggatacaacgtgtttcctaaaagtagagggaggtaagagacggtagcacctgcggggcggcttgcacgccgagtgcctgtgacgcgccggcttaacttaactgcttccctgaagtaccttgaggttcctgatgtgcgggcggtagacggtaggcttatgcggcacgctgtcgtttccaccgtggctactgcgctttgggaaggccacgacctcctcctttggggaggtccttaggatctcagcttggcagtcgagtgggtggcgaccttttaaaggaatgggacccacccggagttc

SEQ ID NO: 707 - DNA, 1079 bp, synthetic construct
  source 1..1079: mol_type = other DNA
cggtggggctggctcctgtgctgcccgactcctgtgctccgacttggagaagacgggcgtccgttcgtccatacccaaaagagtcggccacaaggatgttggcacctgggggtgggccacgagcggccagttaggggtaagagacggtgcaaggtgacttgtccctggtccttcaccgctccagcactgcgccagtgagaaagtccaacaggccccgggatcgggcggcgaaaggaaggggcgtgatgtcactcctgggtggctgacggggcggggtgtatgcagatgagggtcgcgcaggggctgcggcgtccgcagcggccggggaaacgcgagagatttctcgcgcggcgtgggagagaacgcgggtcgccagatgtcagcggagcgccgagacggcgtgtgcgacgagggagacccgagatcgggcggggctaagtgaccgtgtgttaagagtgcaggggcggcgggtgtgagccggggccgggcgctgggagagcaatgatagggacttagggtgatagaagtgcaaagcatgactgtcaaatttttggagcaggttttctgacttcggtcggaaaacccctttcccttcttgtaatacaaaataataacaaccacagaggacatcgcaagtaaaatgtgtataacaaccccatctaaagaaccctatcatctttctactatctgtctacctaaatatgtatagtataaataaccctatatagcactctaagcaacttaagttaggtaacttagaaaactcttttttttttttgagactgagtctcactctgtcgcacccaggctggagtgcagtggcgtgatctcggctcactgcaacctccaccttctgggttcaagtgattctcccatctcagtctcccaagtagctgggattacaggcacgccaccatgccctgctacatttttttttttttagtagagatgaggtttcaccacattggccaggctgttctcgaactcctgacctcaggtgatccgcccaccttggcctcatgaagtgctgggattacaggtgtgagccactgtacccagccagaaaactcttaaaaaac

SEQ ID NO: 708 - DNA, 969 bp, synthetic construct
  source 1..969: mol_type = other DNA
cggtggggctggctcctgtgctgcccgactcctgtgctccgacttggagaagacgggcgtccgttcgtccatacccaaaagagtcggccacaaggatgttggcacctgggggtgggccacgagcggccagttaggggtaagagacggtgcaaggtgacttgtccctggtccttcaccgctccagcactgcgccagtgagaaagtccaacaggccccgggatcgggcggcgaaaggaaggggcgtgatgtcactcctgggtggctgacggggcggggtgtatgcagatgagggtcgcgcaggggctgcggcgtccgcagcggccggggaaacgcgagagatttctcgcgcggcgtgggagagaacgcgggtcgccagatgtcagcggagcgccgagacggcgtgtgcgacgagggagacccgagatcgggcggggctaagtgaccgtgtgttaagagtgcaggggcggcgggtgtgagccggggccgggcgctgggagagcaatgatagggacttagggtgatagaagtgcaaagcatgactgtcaaatttttggagcaggttttctgacttcggtcggaaaacccctctgaattttcttgcagttgaacaacagaggctttttttgtgtgtgtgggggtgcttggttttgggaggttgaagagtacttgttcgcaaactctctaaatgagagatggggaagtgtcttaccagctgattcgcgagagcacctgcaagtttacctgttttagtgatttgcgtttatgaaagttggagttgctgattttgtgatctctacttttaaggtaaaagcagggcggtgttgacttttcttgccagttggctgtcctgttttctttctcgcactgttttctttttgagacgaagtctgtcgctcaggctggagtgcactggcgtgatctcggctcgctgcaaactttgccgaacccctgtttagcgatttccgtttg

SEQ ID NO: 709 - DNA, 1087 bp, synthetic construct
  source 1..1087: mol_type = other DNA
cggtggggctggctcctgtgctgcccgactcctgtgctccgacttggagaagacgggcgtccgttcgtccatacccaaaagagtcggccacaaggatgttggcacctgggggtgggccacgagcggccagttaggggtaagagacggtgcaaggtgacttgtccctggtccttcaccgctccagcactgcgccagtgagaaagtccaacaggccccgggatcgggcggcgaaaggaaggggcgtgatgtcactcctgggtggctgacggggcggggtgtatgcagatgagggtcgcgcaggggctgcggcgtccgcagcggccggggaaacgcgagagatttctcgcgcggcgtgggagagaacgcgggtcgccagatgtcagcggagcgccgagacggcgtgtgcgacgagggagacccgagatcgggcggggctaagtgaccgtgtgttaagagtgcaggggcggcgggtgtgagccggggccgggcgctgggagagcaatgatagggacttagggtgatagaagtgcaaagcatgactgtcaaatttttggagcaggttttctgacttcggtcggaaaacccctatatgtggtaatccaacaatagaaattatttttaagtttgtgtgttcctttttctgttcaatggtgcttttgatattgttgtaaagcagtgactagcagattctgtgtggtaaaagcactgaaccctgtttagttcttttctccctaccttattggtaattatttctgtgtatatatgttccaaagaaatgcggcttgtatattcatgcttttcaactttttgtgatagacagttgatacacaagtagtacctcctccgggatcttcttagtcaagactgtttggtagatgcatgttttttgttacttgtaatgtacagtattcagttcattttctttttgcagcactgtccggttgaaacacaacgcgaggatcgggcgtggtggctcacgcctgtaatcccagcactttgggaggccgaggcaggacaatcaagaccaatcctggtcatcaaggcaggagaatcaagaccatcgaggtcaggagatcaagaccatcct

SEQ ID NO: 710 - DNA, 1085 bp, synthetic construct
  source 1..1085: mol_type = other DNA
cggtggggctggctcctgtgctgcccgactcctgtgctccgacttggagaagacgggcgtccgttcgtccatacccaaaagagtcggccacaaggatgttggcacctgggggtgggccacgagcggccagttaggggtaagagacggtgcaaggtgacttgtccctggtccttcaccgctccagcactgcgccagtgagaaagtccaacaggccccgggatcgggcggcgaaaggaaggggcgtgatgtcactcctgggtggctgacggggcggggtgtatgcagatgagggtcgcgcaggggctgcggcgtccgcagcggccggggaaacgcgagagatttctcgcgcggcgtgggagagaacgcgggtcgccagatgtcagcggagcgccgagacggcgtgtgcgacgagggagacccgagatcgggcggggctaagtgaccgtgtgttaagagtgcaggggcggcgggtgtgagccggggccgggcgctgggagagcaatgatagggacttagggtgatagaagtgcaaagcatgactgtcaaatttttggagcaggttttctgacttcggtcggaaaacccctacatcaggttgtttttctgtttttacatcaggttgtttttctgtttggttttttttttacaccacgtttatacgccggtgcacggtttaccactgaaaacacctttcatctacaggtgatatcttttaacacaaataaaatgtagtagtcctaggagacggaatagaaggaggtggggcctaggcagattcatctctgcggtgcattttgcctctggccctcgggccctagtttgcgatctttcccatcttgcctctgcttccctctgcacaatcctgagtattgcagtaccttacacttaaggaaatttcgtcttgccaaagttgatccatttcagctccgaaacataacaggaactagtgcaacgataaacgtatgaggaacttgcaataagagtgacagaatcctttgaatcaaaaaaaaaaaaagccaccacttaatgagtatctaccatatgtcaagggcttcaccaatatttcattgaaatattccagacca

SEQ ID NO: 711 - DNA, 1087 bp, synthetic construct
  source 1..1087: mol_type = other DNA
cggtggggctggctcctgtgctgcccgactcctgtgctccgacttggagaagacgggcgtccgttcgtccatacccaaaagagtcggccacaaggatgttggcacctgggggtgggccacgagcggccagttaggggtaagagacggtgcaaggtgacttgtccctggtccttcaccgctccagcactgcgccagtgagaaagtccaacaggccccgggatcgggcggcgaaaggaaggggcgtgatgtcactcctgggtggctgacggggcggggtgtatgcagatgagggtcgcgcaggggctgcggcgtccgcagcggccggggaaacgcgagagatttctcgcgcggcgtgggagagaacgcgggtcgccagatgtcagcggagcgccgagacggcgtgtgcgacgagggagacccgagatcgggcggggctaagtgaccgtgtgttaagagtgcaggggcggcgggtgtgagccggggccgggcgctgggagagcaatgatagggacttagggtgatagaagtgcaaagcatgactgtcaaatttttggagcaggttttctgacttcggtcggaaaacccctcttatgatgtttgttgccaatgatagattgttttcactgtgcaaaaattatgggtagttttggtggtcttgatgcagttgtaagcttggggtatgaaggtttgggccacgcctgggcgcttccggctgcgccggatgctgtttcctttccgctcccaggggcgttgggaacggttgtaggacgtggctctttattcgtgagttttccatttacctccgctgaacctagagcttcagacgccctatggcgtccgcctcgacccaaccggcggccttgagcgctgagcaagcaaagggtgagaatcgtcctagtcaaggcataggctgctggcctggggtagtcaaggcatgggctgctggtctggggaggatgcgggcggaggatgtggggcgacaaacctggctacgtccgccgggaaaatggggtaggggacgccgggtaccgtccttctaagtggggcgcttgcccccaagacttgggatcttattgggttacctaca

SEQ ID NO: 712 - DNA, 1085 bp, synthetic construct
  source 1..1085: mol_type = other DNA
cggtggggctggctcctgtgctgcccgactcctgtgctccgacttggagaagacgggcgtccgttcgtccatacccaaaagagtcggccacaaggatgttggcacctgggggtgggccacgagcggccagttaggggtaagagacggtgcaaggtgacttgtccctggtccttcaccgctccagcactgcgccagtgagaaagtccaacaggccccgggatcgggcggcgaaaggaaggggcgtgatgtcactcctgggtggctgacggggcggggtgtatgcagatgagggtcgcgcaggggctgcggcgtccgcagcggccggggaaacgcgagagatttctcgcgcggcgtgggagagaacgcgggtcgccagatgtcagcggagcgccgagacggcgtgtgcgacgagggagacccgagatcgggcggggctaagtgaccgtgtgttaagagtgcaggggcggcgggtgtgagccggggccgggcgctgggagagcaatgatagggacttagggtgatagaagtgcaaagcatgactgtcaaatttttggagcaggttttctgacttcggtcggaaaaccccttctttactgttatatgttaggcgaaatattacgcgtttggagtaagtggtgctttttgtaactgaaaagagattctgtgtgtgtttttttttttttagaggctgcatagttatttgtatgaaccgcaggtgacctaattagcaaggtaattcagacctgtatcctagcacttaagaagtggaagtgggataaccctgcgtgttctcgtgtgggaggctagcttaagcaacaaagcaggaaggccccaccaacaaaagaatttaaaaattatacgtgcgtggtggcgcgcgtatgaggaaattatttggcaactgtgttacagtatagcagcaaatggaatagacctagtccctgactttaggagacctgcctcagccccccgaatggctgggactacaggcgtgcgcctccgcgcccagctaatttttgcatttttggtagagacgggttcaccatgttggccaggatggtctccatctcttcatctggtgatccgcc

SEQ ID NO: 713 - DNA, 1087 bp, synthetic construct
  source 1..1087: mol_type = other DNA
cggtggggctggctcctgtgctgcccgactcctgtgctccgacttggagaagacgggcgtccgttcgtccatacccaaaagagtcggccacaaggatgttggcacctgggggtgggccacgagcggccagttaggggtaagagacggtgcaaggtgacttgtccctggtccttcaccgctccagcactgcgccagtgagaaagtccaacaggccccgggatcgggcggcgaaaggaaggggcgtgatgtcactcctgggtggctgacggggcggggtgtatgcagatgagggtcgcgcaggggctgcggcgtccgcagcggccggggaaacgcgagagatttctcgcgcggcgtgggagagaacgcgggtcgccagatgtcagcggagcgccgagacggcgtgtgcgacgagggagacccgagatcgggcggggctaagtgaccgtgtgttaagagtgcaggggcggcgggtgtgagccggggccgggcgctgggagagcaatgatagggacttagggtgatagaagtgcaaagcatgactgtcaaatttttggagcaggttttctgacttcggtcggaaaacccctaccttattcacgcctaaaaagtagactgactgtggggtggtcgtgttttttgtttcttgttggtaggtggtgaatgcgtttttttcgttgttttctccgttactcaggctgccagttgcttggcagtcttgtcgctggctgtggacgctctgcacttcatcaccgtccccagctgcgctttgagccggtctaaggttgcccacagtattgacgttgggacccacgaaactggcaatttccatgtgtgcggccttacccagttctcccaaacttctgcgtataaccgcttctctgtgcttcagaaagataagtccggccccggcctcacacagcagctcagttcgtgacagcgtttaatatgtaaaatggagcaaataatttatagggcgttgggagagttaaagagactaattcatttacgtgttaaatacagggaatggcttttgcattgatataaccccagcctccagcatgcgccagacctgacgtaggtgttcggc

SEQ ID NO: 714 - DNA, 1087 bp, synthetic construct
  source 1..1087: mol_type = other DNA
cggtggggctggctcctgtgctgcccgactcctgtgctccgacttggagaagacgggcgtccgttcgtccatacccaaaagagtcggccacaaggatgttggcacctgggggtgggccacgagcggccagttaggggtaagagacggtgcaaggtgacttgtccctggtccttcaccgctccagcactgcgccagtgagaaagtccaacaggccccgggatcgggcggcgaaaggaaggggcgtgatgtcactcctgggtggctgacggggcggggtgtatgcagatgagggtcgcgcaggggctgcggcgtccgcagcggccggggaaacgcgagagatttctcgcgcggcgtgggagagaacgcgggtcgccagatgtcagcggagcgccgagacggcgtgtgcgacgagggagacccgagatcgggcggggctaagtgaccgtgtgttaagagtgcaggggcggcgggtgtgagccggggccgggcgctgggagagcaatgatagggacttagggtgatagaagtgcaaagcatgactgtcaaatttttggagcaggttttctgacttcggtcggaaaaccccttttgacccattacccatctaagttagatgcttttttaaatgttttttaatttttaaatttttaatttttttcattatttattttttatttttgagacggatctcggctcactgtaacctccacctcccgggttcaagcgattctcctgactcagcctcccgagtagctgggattacaggcgcgcgccaccatgcccggctaatttttctatttttagtaaagacggggtttcgccatgttgaccagggtggtcttgaactcctgacgtcaggtgatcctcctgcctcgtgctgggattgcaggcgtgagccaccgctcccggcccttagatgctttttaatcagcaagtacgcaatgctttcctgacaggaatgtcaagtccgtcaggaaatccacataagggtgttaagcaggcaaagtaccacatacagattaaaatcaaaagcactgtcaacgcttatttaatttatacagtagaccctaacttttctaattttgtg

SEQ ID NO: 715 - DNA, 1087 bp, synthetic construct
  source 1..1087: mol_type = other DNA
cggtggggctggctcctgtgctgcccgactcctgtgctccgacttggagaagacgggcgtccgttcgtccatacccaaaagagtcggccacaaggatgttggcacctgggggtgggccacgagcggccagttaggggtaagagacggtgcaaggtgacttgtccctggtccttcaccgctccagcactgcgccagtgagaaagtccaacaggccccgggatcgggcggcgaaaggaaggggcgtgatgtcactcctgggtggctgacggggcggggtgtatgcagatgagggtcgcgcaggggctgcggcgtccgcagcggccggggaaacgcgagagatttctcgcgcggcgtgggagagaacgcgggtcgccagatgtcagcggagcgccgagacggcgtgtgcgacgagggagacccgagatcgggcggggctaagtgaccgtgtgttaagagtgcaggggcggcgggtgtgagccggggccgggcgctgggagagcaatgatagggacttagggtgatagaagtgcaaagcatgactgtcaaatttttggagcaggttttctgacttcggtcggaaaacccctgtttacttggttttaaaaatagcttgcactagcgataccgcgaatatggttattaggtttgttaggcacagtcgtgtcttactatagaaaaataacgtagtgttcattttgctgcctgtatgtgttaatttgtccttattgcgccattgttcttgttaagtcttctgtaaggagttgcgggtttcaaactgtcagtctgagagcataagctcacttttcagtcagttgaattgaatgttacattcgattggttctggatattgatattacccaaggcttgtcctgtttgtaagtcttttcctacacctgacaatatgattatgtttacaatgtccctagaactctgggtgtatcgttcccactgaataaaatttgatctctaagttgacctataaatttaagtaccaaaaaactggtttgtaagattttggaaggcagaggcagggaagagaccaacgtggtctacatataaagtaccaggtacatataaagtaccaggt

SEQ ID NO: 716 - DNA, 1083 bp, synthetic construct
  source 1..1083: mol_type = other DNA
cggtggggctggctcctgtgctgcccgactcctgtgctccgacttggagaagacgggcgtccgttcgtccatacccaaaagagtcggccacaaggatgttggcacctgggggtgggccacgagcggccagttaggggtaagagacggtgcaaggtgacttgtccctggtccttcaccgctccagcactgcgccagtgagaaagtccaacaggccccgggatcgggcggcgaaaggaaggggcgtgatgtcactcctgggtggctgacggggcggggtgtatgcagatgagggtcgcgcaggggctgcggcgtccgcagcggccggggaaacgcgagagatttctcgcgcggcgtgggagagaacgcgggtcgccagatgtcagcggagcgccgagacggcgtgtgcgacgagggagacccgagatcgggcggggctaagtgaccgtgtgttaagagtgcaggggcggcgggtgtgagccggggccgggcgctgggagagcaatgatagggacttagggtgatagaagtgcaaagcatgactgtcaaatttttggagcaggttttctgacttcggtcggaaaacccctatttttgtggtgctaaaagttagattgcattccgcccttctcacgtctctttacgtgttgtttgcgaggcgtggcctcggaggtaaatggtctccttttacctcagataagcttacctttgctctgtgagtaagaatgtagctacacttccaaatttagctattgtcctttgcggtccaaatgaaaatattaccttccgatctaacaatgttaaactagtcccaggcccttctatcgattgccagaatagactagactactacacagacacaccctctcaaatcaggccagctcctgcaacctgcacctacagtttgtcccctgggacaaatgaaaggacaggccctctttcccccccccccccaaatcagagcacacacagatcttggggtctggggcagaaatttcgttcatggaaaaaacaaacaaacaaacaaacacgatcaaaggaagctcgttccctttggcctcagggtttcttagacgccgtgttccc

SEQ ID NO: 717 - DNA, 1084 bp, synthetic construct
  source 1..1084: mol_type = other DNA
cggtggggctggctcctgtgctgcccgactcctgtgctccgacttggagaagacgggcgtccgttcgtccatacccaaaagagtcggccacaaggatgttggcacctgggggtgggccacgagcggccagttaggggtaagagacggtgcaaggtgacttgtccctggtccttcaccgctccagcactgcgccagtgagaaagtccaacaggccccgggatcgggcggcgaaaggaaggggcgtgatgtcactcctgggtggctgacggggcggggtgtatgcagatgagggtcgcgcaggggctgcggcgtccgcagcggccggggaaacgcgagagatttctcgcgcggcgtgggagagaacgcgggtcgccagatgtcagcggagcgccgagacggcgtgtgcgacgagggagacccgagatcgggcggggctaagtgaccgtgtgttaagagtgcaggggcggcgggtgtgagccggggccgggcgctgggagagcaatgatagggacttagggtgatagaagtgcaaagcatgactgtcaaatttttggagcaggttttctgacttcggtcggaaaacccctataactggtaaccaaaagcagattactttcccccttgtggtcttcgcgtttgcggacgggagagaactttcggccattttccttttagaaatttaacttcttgaaggccaccaggtgacccttacttccctctcacctttccttctacctgtactttctctattaaaaagcctgcagaagtacccttgacaaattgccaaaaatgacacctaaaaaaaaaaaaaggaaaaacgacaccttaggtaattataggttgtaagaaaaagatttgacctcttggagtttttatttcttaataccaaaggacacccaaggaacgtatctctcaaaattgggtttcaaacctcagccgtttccttcttagttccagtgcttaacacgcaacagacctgcacaccactacactgcatacgagttttaaagttaataaatcagtcacccctccatagtcttctacctacttgaagacagaaacggctgctaggaagcaattcttc

SEQ ID NO: 718 - DNA, 1087 bp, synthetic construct
  source 1..1087: mol_type = other DNA
cggtggggctggctcctgtgctgcccgactcctgtgctccgacttggagaagacgggcgtccgttcgtccatacccaaaagagtcggccacaaggatgttggcacctgggggtgggccacgagcggccagttaggggtaagagacggtgcaaggtgacttgtccctggtccttcaccgctccagcactgcgccagtgagaaagtccaacaggccccgggatcgggcggcgaaaggaaggggcgtgatgtcactcctgggtggctgacggggcggggtgtatgcagatgagggtcgcgcaggggctgcggcgtccgcagcggccggggaaacgcgagagatttctcgcgcggcgtgggagagaacgcgggtcgccagatgtcagcggagcgccgagacggcgtgtgcgacgagggagacccgagatcgggcggggctaagtgaccgtgtgttaagagtgcaggggcggcgggtgtgagccggggccgggcgctgggagagcaatgatagggacttagggtgatagaagtgcaaagcatgactgtcaaatttttggagcaggttttctgacttcggtcggaaaacccctctggggaataagagtggtttaaagaaagaacaatttgagagatctgcttagatctaataaaacccaagtatagtttctttagacgtcttatatctcacgtaggacctcttatttcagactcactgcaagaacaagctaaagaactatatacagtcaggaacaaggtgagccatcgcggttctcagtcccatgatcttaagagtttttcctcttcccctcttccctggctgtcctggagctcactctgtagaccaggctggtctcaaactcagaaatccacttacctctgcctcccaagggctgggattaaaggcatgcaccaccattgcccggcagggtatgtggactatgctgtccttcaactcagagatcgtggtactttaaatctcattttccgaaagaaaagaaaagaaaggaaggggggaaataaagccagtatattttgcacccacaatctgaagttctacaaatattgttagaaaatgcaaaggacccaagtc

SEQ ID NO: 719 - DNA, 1087 bp, synthetic construct
  source 1..1087: mol_type = other DNA
cggtggggctggctcctgtgctgcccgactcctgtgctccgacttggagaagacgggcgtccgttcgtccatacccaaaagagtcggccacaaggatgttggcacctgggggtgggccacgagcggccagttaggggtaagagacggtgcaaggtgacttgtccctggtccttcaccgctccagcactgcgccagtgagaaagtccaacaggccccgggatcgggcggcgaaaggaaggggcgtgatgtcactcctgggtggctgacggggcggggtgtatgcagatgagggtcgcgcaggggctgcggcgtccgcagcggccggggaaacgcgagagatttctcgcgcggcgtgggagagaacgcgggtcgccagatgtcagcggagcgccgagacggcgtgtgcgacgagggagacccgagatcgggcggggctaagtgaccgtgtgttaagagtgcaggggcggcgggtgtgagccggggccgggcgctgggagagcaatgatagggacttagggtgatagaagtgcaaagcatgactgtcaaatttttggagcaggttttctgacttcggtcggaaaacccctctcggtttatcttaaagggttttaaatatagaaagcttccttagtcttatgggtgagagtgctgtttaagccttacctaggtatgtctttgaacatttattacagattgttatttgtgactatgaccactcaggtgttctgttcttgtgaatttagacacactcagaaaggctacacactcaaagaccacaccaaagtgaagtactatctgggccgtgaaactggtcacatatcagttattttgcagtaaaacaaggaagtcaatcatactgcttcagtgggtcagggagtcaagaatgcacagtacaagagctggtgagattcctcagcaggtaagagcactgaatgctcttccaaagattctgagttcaaatcccagcaaccacgtggtggatttgaacaaaggatgaaaacaaccatccataaccagatctgatgccctcttctggagtgtcaaaagacagctatggtgtacttacataaataaataagtaaaaaca

SEQ ID NO: 720 - DNA, 1087 bp, synthetic construct
  source 1..1087: mol_type = other DNA
cggtggggctggctcctgtgctgcccgactcctgtgctccgacttggagaagacgggcgtccgttcgtccatacccaaaagagtcggccacaaggatgttggcacctgggggtgggccacgagcggccagttaggggtaagagacggtgcaaggtgacttgtccctggtccttcaccgctccagcactgcgccagtgagaaagtccaacaggccccgggatcgggcggcgaaaggaaggggcgtgatgtcactcctgggtggctgacggggcggggtgtatgcagatgagggtcgcgcaggggctgcggcgtccgcagcggccggggaaacgcgagagatttctcgcgcggcgtgggagagaacgcgggtcgccagatgtcagcggagcgccgagacggcgtgtgcgacgagggagacccgagatcgggcggggctaagtgaccgtgtgttaagagtgcaggggcggcgggtgtgagccggggccgggcgctgggagagcaatgatagggacttagggtgatagaagtgcaaagcatgactgtcaaatttttggagcaggttttctgacttcggtcggaaaacccctccacattttgtgtttaaaaatagaaatatttaagtgagatcagtttaaatctgctttatctagggtgtctaactgcttgcatctttttaacttttccttatttgtgagaaggtctgtaaaacttattatatgttagtacactgtagctgtcttcagacactccagaagagggattcagatcaccttacagatggttttgagccaccatgtggttgctgggatttgaactcaggacctttagaaaagtagttgggtgctcttacccgctgagccatctcaccagccctttttttttcttttttccagttcgggtttctctgtgtgtagccctggctgtcctggaactcattctgtagaccgggctggcctcgaactcagaaatctgcctgcctctgcctcccaagtgctgggattaaaggaatgtgccttcattgcccggctctagggctttttgttgttgtttgtttgtttgtttgtttgtttgcttttgtggatggcct

SEQ ID NO: 721 - DNA, 1087 bp, synthetic construct
  source 1..1087: mol_type = other DNA
cggtggggctggctcctgtgctgcccgactcctgtgctccgacttggagaagacgggcgtccgttcgtccatacccaaaagagtcggccacaaggatgttggcacctgggggtgggccacgagcggccagttaggggtaagagacggtgcaaggtgacttgtccctggtccttcaccgctccagcactgcgccagtgagaaagtccaacaggccccgggatcgggcggcgaaaggaaggggcgtgatgtcactcctgggtggctgacggggcggggtgtatgcagatgagggtcgcgcaggggctgcggcgtccgcagcggccggggaaacgcgagagatttctcgcgcggcgtgggagagaacgcgggtcgccagatgtcagcggagcgccgagacggcgtgtgcgacgagggagacccgagatcgggcggggctaagtgaccgtgtgttaagagtgcaggggcggcgggtgtgagccggggccgggcgctgggagagcaatgatagggacttagggtgatagaagtgcaaagcatgactgtcaaatttttggagcaggttttctgacttcggtcggaaaacccctaaaaccagtaagggagaaaggtcaagtaacatataaaggaaggcctatcagaattacaccagacttttcaccagagactatgaaagccagaagagcctggacagatgttatacagacactaagagaacacaaatgccagcccaggctactatacctggccaaactctcaattaccatagatggagaaaccaaagtattccacgacaaaaacaaattcacacaatatctttccacgaatccagcccttcaaaggataatgacagaaaagaagcaatacaaggacggaaatcacgccctagaacaaccaagaaactaatcattcaacaaaccaaaaagaagacagccacaagaacagaatgccaactctaacaacaaaaataaaaggaagcaacaattacttttccttaatatctcttaatatcaatggactcaattccccaataaaaagacatagactaacagactggctacacaaacaggacccaacattctgctgctta

SEQ ID NO: 722 - DNA, 1087 bp, synthetic construct
  source 1..1087: mol_type = other DNA
cggtggggctggctcctgtgctgcccgactcctgtgctccgacttggagaagacgggcgtccgttcgtccatacccaaaagagtcggccacaaggatgttggcacctgggggtgggccacgagcggccagttaggggtaagagacggtgcaaggtgacttgtccctggtccttcaccgctccagcactgcgccagtgagaaagtccaacaggccccgggatcgggcggcgaaaggaaggggcgtgatgtcactcctgggtggctgacggggcggggtgtatgcagatgagggtcgcgcaggggctgcggcgtccgcagcggccggggaaacgcgagagatttctcgcgcggcgtgggagagaacgcgggtcgccagatgtcagcggagcgccgagacggcgtgtgcgacgagggagacccgagatcgggcggggctaagtgaccgtgtgttaagagtgcaggggcggcgggtgtgagccggggccgggcgctgggagagcaatgatagggacttagggtgatagaagtgcaaagcatgactgtcaaatttttggagcaggttttctgacttcggtcggaaaacccctcccaatttcactggtctacaatgaaagcaaaacagttctcttccccgctccccggtgtgtgagaggggctttgatccttctctggtttcctaggaaacgcgtatgtgctagagccacgctctgagacttccgcctcgtgcggtcccgcttcctttctgcctcctctggcctgcatccgtgggggaggtggctggctgcagggttctccggatctcttctgtgttcccactactcaagcaccgagtggcgttctatggcgtccgcctcggctcagcccgcggccctgagcgcggagcaggccaagggtgaggaaagagcctagtctgggtgtgggccgtcttctggggggagggcgcgatactattctttgcctctccaagtggggcccttgcccattagggcgaagggttgggaggacaagcttatcgggttgcttgcaggcctcggcccactaattccctgcctcttccctcctctgggctcgcccgccgtcctccgcg

SEQ ID NO: 723 - DNA, 1087 bp, synthetic construct
  source 1..1087: mol_type = other DNA
cggtggggctggctcctgtgctgcccgactcctgtgctccgacttggagaagacgggcgtccgttcgtccatacccaaaagagtcggccacaaggatgttggcacctgggggtgggccacgagcggccagttaggggtaagagacggtgcaaggtgacttgtccctggtccttcaccgctccagcactgcgccagtgagaaagtccaacaggccccgggatcgggcggcgaaaggaaggggcgtgatgtcactcctgggtggctgacggggcggggtgtatgcagatgagggtcgcgcaggggctgcggcgtccgcagcggccggggaaacgcgagagatttctcgcgcggcgtgggagagaacgcgggtcgccagatgtcagcggagcgccgagacggcgtgtgcgacgagggagacccgagatcgggcggggctaagtgaccgtgtgttaagagtgcaggggcggcgggtgtgagccggggccgggcgctgggagagcaatgatagggacttagggtgatagaagtgcaaagcatgactgtcaaatttttggagcaggttttctgacttcggtcggaaaacccctgaatttgttaaattacaggaggaagcttttttagttcattttacaaatactttcttgttaggtagataataccttctaaggttattatctggatcttctaagtctttttatcgctagcaagtctaagtttctggactttggaattagaagttaatgtcgtaggcgggcatggtggtccacgcctttaatcccagagtttgggaggcagacgcaggtggttttctgagttcgaggccatcctgctcttcaatgttagttccaggacagccagggttatacaaagaaaccctgtctcgagaaacaaaacaaacaaaaaaagagtagctgagtgctctgagttgtctctccagccccttagctatttattttcatttaaattatttttgttttattcgcttgtgtgcctgagtttgaatttcccgggattaacagttgaagactagggctggtgagatggctcagcggttaagattgccgactgctcttccaaaggtcctgag

SEQ ID NO: 724 - DNA, 1087 bp, synthetic construct
  source 1..1087: mol_type = other DNA
cggtggggctggctcctgtgctgcccgactcctgtgctccgacttggagaagacgggcgtccgttcgtccatacccaaaagagtcggccacaaggatgttggcacctgggggtgggccacgagcggccagttaggggtaagagacggtgcaaggtgacttgtccctggtccttcaccgctccagcactgcgccagtgagaaagtccaacaggccccgggatcgggcggcgaaaggaaggggcgtgatgtcactcctgggtggctgacggggcggggtgtatgcagatgagggtcgcgcaggggctgcggcgtccgcagcggccggggaaacgcgagagatttctcgcgcggcgtgggagagaacgcgggtcgccagatgtcagcggagcgccgagacggcgtgtgcgacgagggagacccgagatcgggcggggctaagtgaccgtgtgttaagagtgcaggggcggcgggtgtgagccggggccgggcgctgggagagcaatgatagggacttagggtgatagaagtgcaaagcatgactgtcaaatttttggagcaggttttctgacttcggtcggaaaacccctaccccctaattctacaagaatagaaagcttagcagctcctctgaatggttgctctcaggtgctagtggttgcaagtcgtatgttgatgcctgcctttgccctacctggtgtgtgagcgtgagcgcgccccacctctccagcctctctcttactgtttttcagacaagatgggactgttgttctcctactgctatgtacctcaatttcaattgatcatgcctggacataactgcccatgttgtaaggtcgtctacgttgtaaggtcgtgctcagtttctgatgcctagactagtcacctttccgtttgcctcctgactgtgtaaatgaggcaaatgaaggtggtctcttaactgacatgttagtgtttgacctatgggatagtttctcattgttgagacagaatttctagaagctggtccgctgagcggctaagagcacttgctgatattgcaaaggatctacctgggtttggttctcagcactcacatggaagttcacat

SEQ ID NO: 725 - DNA, 654 bp, synthetic construct
  source 1..654: mol_type = other DNA
cggtggggctggctcctgtgctgcccgactcctgtgctccgacttggagaagacgggcgtccgttcgtccatacccaaaagagtcggccacaaggatgttggcacctgggggtgggccacgagcggccagttaggggtaagagacggtgcaaggtgacttgtccctggtccttcaccgctccagcactgcgccagtgagaaagtccaacaggccccgggatcgggcggcgaaaggaaggggcgtgatgtcactcctgggtggctgacggggcggggtgtatgcagatgagggtcgcgcaggggctgcggcgtccgcagcggccggggaaacgcgagagatttctcgcgcggcgtgggagagaacgcgggtcgccagatgtcagcggagcgccgagacggcgtgtgcgacgagggagacccgagatcgggcggggctaagtgaccgtgtgttaagagtgcaggggcggcgggtgtgagccggggccgggcgctgggagagcaatgatagggacttagggtgatagaagtgcaaagcatgactgtcaaatttttggagcaggttttctgacttcggtcggaaaaccccttgtagttcctgcaatttaattttcgtttaaaactttattttattctttaacttaaaaaaaatatata

SEQ ID NO: 726 - DNA, 1087 bp, synthetic construct
  source 1..1087: mol_type = other DNA
gctcctcctaggagctaacactggagccagggggatcaaagctgtgtagtgagtgtcacaaaacatcctagcactaaggagactgagacgggaacattgtagtaagttctagcctgggctacagtaagagacgtagtctcaaacaaggaaatgcgctataaataaataagatggagcttcaatggtctgtgcataactggggggttgaaggagccttccaaaggctgggttccggctccgttcagtcgttgacttgagctgggcggggcatgcaaataaggacgccgcctggtctccgcggaactctgggaacgaaaagcgcaacaaaatcctctcggcccccttggattcctcgggctttccctggcgtaaaggtggtggacaggatagaagaggagtttcggcgtcgggcgcgtgtttgcggtcgcgcgagtgttggcgaccgtgagttgaaggtgtgtgtggtgttgagtgtatggggcgtgtgggcgcagttcggtaatgatagggacttagggtgatagaagtgcaaagcatgactgtcaaatttttggagcaggttttctgacttcggtcggaaaacccctactttctggagtttcaaaaacagactgtacgccaagggtcatatctttttttgtattggtttgtgtcttggttggtgtcttaggtgttaatcctacagtggagggtttatgggaataggaagtaacatgtcgcctgcatgtcataggagaaaaagcgagcatcagccgtatcggctttgtaacacaaattagctatcgtgaagtccgctcagctcttccctttctaccctggctgctttttgcagggattggtccgtggtctccagtctcttgggttctcaccctgtgtgaaaatcttcgtgtttttccctaccccccagtcacctcttacacagcctctgcttccaagcgcagcccccacaggagtttgtaggatttctgtgctagcggggaatgtgttctcacctcatagagccaggtagaaattatgcagatgggcagttctctgggaagaaagcagggcctttggggctctcagtgtccccgttgggttgtagaca

SEQ ID NO: 727 - DNA, 1087 bp, synthetic construct
  source 1..1087: mol_type = other DNA
gctcctcctaggagctaacactggagccagggggatcaaagctgtgtagtgagtgtcacaaaacatcctagcactaaggagactgagacgggaacattgtagtaagttctagcctgggctacagtaagagacgtagtctcaaacaaggaaatgcgctataaataaataagatggagcttcaatggtctgtgcataactggggggttgaaggagccttccaaaggctgggttccggctccgttcagtcgttgacttgagctgggcggggcatgcaaataaggacgccgcctggtctccgcggaactctgggaacgaaaagcgcaacaaaatcctctcggcccccttggattcctcgggctttccctggcgtaaaggtggtggacaggatagaagaggagtttcggcgtcgggcgcgtgtttgcggtcgcgcgagtgttggcgaccgtgagttgaaggtgtgtgtggtgttgagtgtatggggcgtgtgggcgcagttcggtaatgatagggacttagggtgatagaagtgcaaagcatgactgtcaaatttttggagcaggttttctgacttcggtcggaaaacccctactttctggagtttctaaaagtagactgtacgctaagggtcatatctttttttgttttggtttgtgtcttggttggcgtcttaaatgttaatcctacagtggagggctggcgaataggaagtaacatgtcgcctgcacgccataggagaaaaagcgagcatcagccgtatcggctttgtaacacaaattagctatcgtgaagtccgctcagctcttccctttctaccctggctgctttttgcagggattggtccgtggtctccagtctcttgggttctcaccctgtgtgaaaatcttcctgtttttccctaccccccaagtcacctcttacacagcctctgcttccaagcgcagcccccacaggagtttgtaggatttctgtgctagcggggagtgtgttctcacctcatagagccaggtagaaactacgcagatgggtgctgttctccaggaagaaagcagggcctttggggctctcagtgtccccgttgggttgtaga

SEQ ID NO: 728 - DNA, 1087 bp, synthetic construct
  source 1..1087: mol_type = other DNA
gctcctcctaggagctaacactggagccagggggatcaaagctgtgtagtgagtgtcacaaaacatcctagcactaaggagactgagacgggaacattgtagtaagttctagcctgggctacagtaagagacgtagtctcaaacaaggaaatgcgctataaataaataagatggagcttcaatggtctgtgcataactggggggttgaaggagccttccaaaggctgggttccggctccgttcagtcgttgacttgagctgggcggggcatgcaaataaggacgccgcctggtctccgcggaactctgggaacgaaaagcgcaacaaaatcctctcggcccccttggattcctcgggctttccctggcgtaaaggtggtggacaggatagaagaggagtttcggcgtcgggcgcgtgtttgcggtcgcgcgagtgttggcgaccgtgagttgaaggtgtgtgtggtgttgagtgtatggggcgtgtgggcgcagttcggtaatgatagggacttagggtgatagaagtgcaaagcatgactgtcaaatttttggagcaggttttctgacttcggtcggaaaacccctactttctggagtttcaaaaacagaccgtacgccaagggtcatgtcttttttcgtattggtttgtgtcttagttgttaatcctacagtggaggcctggggaataagaagtaacatgtggcctgcacgccataggagaaaaagcgagcatcagccgtatcggctttgtaacacaaattagctatcgtgaagtccgctcagctcttccatttctaccctggctgctttttgcagggattggtccgtggtctccagtctcttgggttctcaccctgtgtgaaaatcttcgtgtttttccctaccccccaagtcacctcttacacagcctctgcttccaagcgcagcccccacaggagtttgtaggatttctgtgctagcggggagtgtgttctcacctcatagagccaggtagaaattatgcagatgggcgctgttctctgggaagaaagcagggcctttggggctctcagtgtccccgttgggttgtagacataacactctta

SEQ ID NO: 729 - DNA, 891 bp, synthetic construct
  source 1..891: mol_type = other DNA
gctcctcctaggagctaacactggagccagggggatcaaagctgtgtagtgagtgtcacaaaacatcctagcactaaggagactgagacgggaacattgtagtaagttctagcctgggctacagtaagagacgtagtctcaaacaaggaaatgcgctataaataaataagatggagcttcaatggtctgtgcataactggggggttgaaggagccttccaaaggctgggttccggctccgttcagtcgttgacttgagctgggcggggcatgcaaataaggacgccgcctggtctccgcggaactctgggaacgaaaagcgcaacaaaatcctctcggcccccttggattcctcgggctttccctggcgtaaaggtggtggacaggatagaagaggagtttcggcgtcgggcgcgtgtttgcggtcgcgcgagtgttggcgaccgtgagttgaaggtgtgtgtggtgttgagtgtatggggcgtgtgggcgcagttcggtaatgatagggacttagggtgatagaagtgcaaagcatgactgtcaaatttttggagcaggttttctgacttcggtcggaaaacccctcctccggggatacaacgtgtttcctaaaagtagagggaggtaagagacggtagcacctgcggggcggcttgcacgccgagtgcctgtgacgcgccggcttaacttaactgcttccctgaagtaccttgaggttcctgatgtgcgggcggtagacggtaggcttatgcggcacgctgtcgtttccaccgtggctactgcgctttgggaaggccacgacctcctcctttggggaggtccttaggatctcagcttggcagtcgagtgggtggcgaccttttaaaggaatgggacccacccggagttc

SEQ ID NO: 730 - DNA, 1079 bp, synthetic construct
  source 1..1079: mol_type = other DNA
gctcctcctaggagctaacactggagccagggggatcaaagctgtgtagtgagtgtcacaaaacatcctagcactaaggagactgagacgggaacattgtagtaagttctagcctgggctacagtaagagacgtagtctcaaacaaggaaatgcgctataaataaataagatggagcttcaatggtctgtgcataactggggggttgaaggagccttccaaaggctgggttccggctccgttcagtcgttgacttgagctgggcggggcatgcaaataaggacgccgcctggtctccgcggaactctgggaacgaaaagcgcaacaaaatcctctcggcccccttggattcctcgggctttccctggcgtaaaggtggtggacaggatagaagaggagtttcggcgtcgggcgcgtgtttgcggtcgcgcgagtgttggcgaccgtgagttgaaggtgtgtgtggtgttgagtgtatggggcgtgtgggcgcagttcggtaatgatagggacttagggtgatagaagtgcaaagcatgactgtcaaatttttggagcaggttttctgacttcggtcggaaaacccctttcccttcttgtaatacaaaataataacaaccacagaggacatcgcaagtaaaatgtgtataacaaccccatctaaagaaccctatcatctttctactatctgtctacctaaatatgtatagtataaataaccctatatagcactctaagcaacttaagttaggtaacttagaaaactcttttttttttttgagactgagtctcactctgtcgcacccaggctggagtgcagtggcgtgatctcggctcactgcaacctccaccttctgggttcaagtgattctcccatctcagtctcccaagtagctgggattacaggcacgccaccatgccctgctacatttttttttttttagtagagatgaggtttcaccacattggccaggctgttctcgaactcctgacctcaggtgatccgcccaccttggcctcatgaagtgctgggattacaggtgtgagccactgtacccagccagaaaactcttaaaaaac

SEQ ID NO: 731 - DNA, 969 bp, synthetic construct
  source 1..969: mol_type = other DNA
gctcctcctaggagctaacactggagccagggggatcaaagctgtgtagtgagtgtcacaaaacatcctagcactaaggagactgagacgggaacattgtagtaagttctagcctgggctacagtaagagacgtagtctcaaacaaggaaatgcgctataaataaataagatggagcttcaatggtctgtgcataactggggggttgaaggagccttccaaaggctgggttccggctccgttcagtcgttgacttgagctgggcggggcatgcaaataaggacgccgcctggtctccgcggaactctgggaacgaaaagcgcaacaaaatcctctcggcccccttggattcctcgggctttccctggcgtaaaggtggtggacaggatagaagaggagtttcggcgtcgggcgcgtgtttgcggtcgcgcgagtgttggcgaccgtgagttgaaggtgtgtgtggtgttgagtgtatggggcgtgtgggcgcagttcggtaatgatagggacttagggtgatagaagtgcaaagcatgactgtcaaatttttggagcaggttttctgacttcggtcggaaaacccctctgaattttcttgcagttgaacaacagaggctttttttgtgtgtgtgggggtgcttggttttgggaggttgaagagtacttgttcgcaaactctctaaatgagagatggggaagtgtcttaccagctgattcgcgagagcacctgcaagtttacctgttttagtgatttgcgtttatgaaagttggagttgctgattttgtgatctctacttttaaggtaaaagcagggcggtgttgacttttcttgccagttggctgtcctgttttctttctcgcactgttttctttttgagacgaagtctgtcgctcaggctggagtgcactggcgtgatctcggctcgctgcaaactttgccgaacccctgtttagcgatttccgtttg

SEQ ID NO: 732 - DNA, 1087 bp, synthetic construct
  source 1..1087: mol_type = other DNA
gctcctcctaggagctaacactggagccagggggatcaaagctgtgtagtgagtgtcacaaaacatcctagcactaaggagactgagacgggaacattgtagtaagttctagcctgggctacagtaagagacgtagtctcaaacaaggaaatgcgctataaataaataagatggagcttcaatggtctgtgcataactggggggttgaaggagccttccaaaggctgggttccggctccgttcagtcgttgacttgagctgggcggggcatgcaaataaggacgccgcctggtctccgcggaactctgggaacgaaaagcgcaacaaaatcctctcggcccccttggattcctcgggctttccctggcgtaaaggtggtggacaggatagaagaggagtttcggcgtcgggcgcgtgtttgcggtcgcgcgagtgttggcgaccgtgagttgaaggtgtgtgtggtgttgagtgtatggggcgtgtgggcgcagttcggtaatgatagggacttagggtgatagaagtgcaaagcatgactgtcaaatttttggagcaggttttctgacttcggtcggaaaacccctatatgtggtaatccaacaatagaaattatttttaagtttgtgtgttcctttttctgttcaatggtgcttttgatattgttgtaaagcagtgactagcagattctgtgtggtaaaagcactgaaccctgtttagttcttttctccctaccttattggtaattatttctgtgtatatatgttccaaagaaatgcggcttgtatattcatgcttttcaactttttgtgatagacagttgatacacaagtagtacctcctccgggatcttcttagtcaagactgtttggtagatgcatgttttttgttacttgtaatgtacagtattcagttcattttctttttgcagcactgtccggttgaaacacaacgcgaggatcgggcgtggtggctcacgcctgtaatcccagcactttgggaggccgaggcaggacaatcaagaccaatcctggtcatcaaggcaggagaatcaagaccatcgaggtcaggagatcaagaccatcct

SEQ ID NO: 733 - DNA, 1085 bp, synthetic construct
  source 1..1085: mol_type = other DNA
gctcctcctaggagctaacactggagccagggggatcaaagctgtgtagtgagtgtcacaaaacatcctagcactaaggagactgagacgggaacattgtagtaagttctagcctgggctacagtaagagacgtagtctcaaacaaggaaatgcgctataaataaataagatggagcttcaatggtctgtgcataactggggggttgaaggagccttccaaaggctgggttccggctccgttcagtcgttgacttgagctgggcggggcatgcaaataaggacgccgcctggtctccgcggaactctgggaacgaaaagcgcaacaaaatcctctcggcccccttggattcctcgggctttccctggcgtaaaggtggtggacaggatagaagaggagtttcggcgtcgggcgcgtgtttgcggtcgcgcgagtgttggcgaccgtgagttgaaggtgtgtgtggtgttgagtgtatggggcgtgtgggcgcagttcggtaatgatagggacttagggtgatagaagtgcaaagcatgactgtcaaatttttggagcaggttttctgacttcggtcggaaaacccctacatcaggttgtttttctgtttttacatcaggttgtttttctgtttggttttttttttacaccacgtttatacgccggtgcacggtttaccactgaaaacacctttcatctacaggtgatatcttttaacacaaataaaatgtagtagtcctaggagacggaatagaaggaggtggggcctaggcagattcatctctgcggtgcattttgcctctggccctcgggccctagtttgcgatctttcccatcttgcctctgcttccctctgcacaatcctgagtattgcagtaccttacacttaaggaaatttcgtcttgccaaagttgatccatttcagctccgaaacataacaggaactagtgcaacgataaacgtatgaggaacttgcaataagagtgacagaatcctttgaatcaaaaaaaaaaaaagccaccacttaatgagtatctaccatatgtcaagggcttcaccaatatttcattgaaatattccagacca

SEQ ID NO: 734 - DNA, 1087 bp, synthetic construct
  source 1..1087: mol_type = other DNA
gctcctcctaggagctaacactggagccagggggatcaaagctgtgtagtgagtgtcacaaaacatcctagcactaaggagactgagacgggaacattgtagtaagttctagcctgggctacagtaagagacgtagtctcaaacaaggaaatgcgctataaataaataagatggagcttcaatggtctgtgcataactggggggttgaaggagccttccaaaggctgggttccggctccgttcagtcgttgacttgagctgggcggggcatgcaaataaggacgccgcctggtctccgcggaactctgggaacgaaaagcgcaacaaaatcctctcggcccccttggattcctcgggctttccctggcgtaaaggtggtggacaggatagaagaggagtttcggcgtcgggcgcgtgtttgcggtcgcgcgagtgttggcgaccgtgagttgaaggtgtgtgtggtgttgagtgtatggggcgtgtgggcgcagttcggtaatgatagggacttagggtgatagaagtgcaaagcatgactgtcaaatttttggagcaggttttctgacttcggtcggaaaacccctcttatgatgtttgttgccaatgatagattgttttcactgtgcaaaaattatgggtagttttggtggtcttgatgcagttgtaagcttggggtatgaaggtttgggccacgcctgggcgcttccggctgcgccggatgctgtttcctttccgctcccaggggcgttgggaacggttgtaggacgtggctctttattcgtgagttttccatttacctccgctgaacctagagcttcagacgccctatggcgtccgcctcgacccaaccggcggccttgagcgctgagcaagcaaagggtgagaatcgtcctagtcaaggcataggctgctggcctggggtagtcaaggcatgggctgctggtctggggaggatgcgggcggaggatgtggggcgacaaacctggctacgtccgccgggaaaatggggtaggggacgccgggtaccgtccttctaagtggggcgcttgcccccaagacttgggatcttattgggttacctaca

SEQ ID NO: 735 - DNA, 1085 bp, synthetic construct
  source 1..1085: mol_type = other DNA
gctcctcctaggagctaacactggagccagggggatcaaagctgtgtagtgagtgtcacaaaacatcctagcactaaggagactgagacgggaacattgtagtaagttctagcctgggctacagtaagagacgtagtctcaaacaaggaaatgcgctataaataaataagatggagcttcaatggtctgtgcataactggggggttgaaggagccttccaaaggctgggttccggctccgttcagtcgttgacttgagctgggcggggcatgcaaataaggacgccgcctggtctccgcggaactctgggaacgaaaagcgcaacaaaatcctctcggcccccttggattcctcgggctttccctggcgtaaaggtggtggacaggatagaagaggagtttcggcgtcgggcgcgtgtttgcggtcgcgcgagtgttggcgaccgtgagttgaaggtgtgtgtggtgttgagtgtatggggcgtgtgggcgcagttcggtaatgatagggacttagggtgatagaagtgcaaagcatgactgtcaaatttttggagcaggttttctgacttcggtcggaaaaccccttctttactgttatatgttaggcgaaatattacgcgtttggagtaagtggtgctttttgtaactgaaaagagattctgtgtgtgtttttttttttttagaggctgcatagttatttgtatgaaccgcaggtgacctaattagcaaggtaattcagacctgtatcctagcacttaagaagtggaagtgggataaccctgcgtgttctcgtgtgggaggctagcttaagcaacaaagcaggaaggccccaccaacaaaagaatttaaaaattatacgtgcgtggtggcgcgcgtatgaggaaattatttggcaactgtgttacagtatagcagcaaatggaatagacctagtccctgactttaggagacctgcctcagccccccgaatggctgggactacaggcgtgcgcctccgcgcccagctaatttttgcatttttggtagagacgggttcaccatgttggccaggatggtctccatctcttcatctggtgatccgcc

SEQ ID NO: 736 - DNA, 1087 bp, synthetic construct
  source 1..1087: mol_type = other DNA
gctcctcctaggagctaacactggagccagggggatcaaagctgtgtagtgagtgtcacaaaacatcctagcactaaggagactgagacgggaacattgtagtaagttctagcctgggctacagtaagagacgtagtctcaaacaaggaaatgcgctataaataaataagatggagcttcaatggtctgtgcataactggggggttgaaggagccttccaaaggctgggttccggctccgttcagtcgttgacttgagctgggcggggcatgcaaataaggacgccgcctggtctccgcggaactctgggaacgaaaagcgcaacaaaatcctctcggcccccttggattcctcgggctttccctggcgtaaaggtggtggacaggatagaagaggagtttcggcgtcgggcgcgtgtttgcggtcgcgcgagtgttggcgaccgtgagttgaaggtgtgtgtggtgttgagtgtatggggcgtgtgggcgcagttcggtaatgatagggacttagggtgatagaagtgcaaagcatgactgtcaaatttttggagcaggttttctgacttcggtcggaaaacccctaccttattcacgcctaaaaagtagactgactgtggggtggtcgtgttttttgtttcttgttggtaggtggtgaatgcgtttttttcgttgttttctccgttactcaggctgccagttgcttggcagtcttgtcgctggctgtggacgctctgcacttcatcaccgtccccagctgcgctttgagccggtctaaggttgcccacagtattgacgttgggacccacgaaactggcaatttccatgtgtgcggccttacccagttctcccaaacttctgcgtataaccgcttctctgtgcttcagaaagataagtccggccccggcctcacacagcagctcagttcgtgacagcgtttaatatgtaaaatggagcaaataatttatagggcgttgggagagttaaagagactaattcatttacgtgttaaatacagggaatggcttttgcattgatataaccccagcctccagcatgcgccagacctgacgtaggtgttcggc

SEQ ID NO: 737 - DNA, 1087 bp, synthetic construct
  source 1..1087: mol_type = other DNA
gctcctcctaggagctaacactggagccagggggatcaaagctgtgtagtgagtgtcacaaaacatcctagcactaaggagactgagacgggaacattgtagtaagttctagcctgggctacagtaagagacgtagtctcaaacaaggaaatgcgctataaataaataagatggagcttcaatggtctgtgcataactggggggttgaaggagccttccaaaggctgggttccggctccgttcagtcgttgacttgagctgggcggggcatgcaaataaggacgccgcctggtctccgcggaactctgggaacgaaaagcgcaacaaaatcctctcggcccccttggattcctcgggctttccctggcgtaaaggtggtggacaggatagaagaggagtttcggcgtcgggcgcgtgtttgcggtcgcgcgagtgttggcgaccgtgagttgaaggtgtgtgtggtgttgagtgtatggggcgtgtgggcgcagttcggtaatgatagggacttagggtgatagaagtgcaaagcatgactgtcaaatttttggagcaggttttctgacttcggtcggaaaaccccttttgacccattacccatctaagttagatgcttttttaaatgttttttaatttttaaatttttaatttttttcattatttattttttatttttgagacggatctcggctcactgtaacctccacctcccgggttcaagcgattctcctgactcagcctcccgagtagctgggattacaggcgcgcgccaccatgcccggctaatttttctatttttagtaaagacggggtttcgccatgttgaccagggtggtcttgaactcctgacgtcaggtgatcctcctgcctcgtgctgggattgcaggcgtgagccaccgctcccggcccttagatgctttttaatcagcaagtacgcaatgctttcctgacaggaatgtcaagtccgtcaggaaatccacataagggtgttaagcaggcaaagtaccacatacagattaaaatcaaaagcactgtcaacgcttatttaatttatacagtagaccctaacttttctaattttgtg

SEQ ID NO: 738 - DNA, 1087 bp, synthetic construct
  source 1..1087: mol_type = other DNA
gctcctcctaggagctaacactggagccagggggatcaaagctgtgtagtgagtgtcacaaaacatcctagcactaaggagactgagacgggaacattgtagtaagttctagcctgggctacagtaagagacgtagtctcaaacaaggaaatgcgctataaataaataagatggagcttcaatggtctgtgcataactggggggttgaaggagccttccaaaggctgggttccggctccgttcagtcgttgacttgagctgggcggggcatgcaaataaggacgccgcctggtctccgcggaactctgggaacgaaaagcgcaacaaaatcctctcggcccccttggattcctcgggctttccctggcgtaaaggtggtggacaggatagaagaggagtttcggcgtcgggcgcgtgtttgcggtcgcgcgagtgttggcgaccgtgagttgaaggtgtgtgtggtgttgagtgtatggggcgtgtgggcgcagttcggtaatgatagggacttagggtgatagaagtgcaaagcatgactgtcaaatttttggagcaggttttctgacttcggtcggaaaacccctgtttacttggttttaaaaatagcttgcactagcgataccgcgaatatggttattaggtttgttaggcacagtcgtgtcttactatagaaaaataacgtagtgttcattttgctgcctgtatgtgttaatttgtccttattgcgccattgttcttgttaagtcttctgtaaggagttgcgggtttcaaactgtcagtctgagagcataagctcacttttcagtcagttgaattgaatgttacattcgattggttctggatattgatattacccaaggcttgtcctgtttgtaagtcttttcctacacctgacaatatgattatgtttacaatgtccctagaactctgggtgtatcgttcccactgaataaaatttgatctctaagttgacctataaatttaagtaccaaaaaactggtttgtaagattttggaaggcagaggcagggaagagaccaacgtggtctacatataaagtaccaggtacatataaagtaccaggt

SEQ ID NO: 739 - DNA, 1083 bp, synthetic construct
  source 1..1083: mol_type = other DNA
gctcctcctaggagctaacactggagccagggggatcaaagctgtgtagtgagtgtcacaaaacatcctagcactaaggagactgagacgggaacattgtagtaagttctagcctgggctacagtaagagacgtagtctcaaacaaggaaatgcgctataaataaataagatggagcttcaatggtctgtgcataactggggggttgaaggagccttccaaaggctgggttccggctccgttcagtcgttgacttgagctgggcggggcatgcaaataaggacgccgcctggtctccgcggaactctgggaacgaaaagcgcaacaaaatcctctcggcccccttggattcctcgggctttccctggcgtaaaggtggtggacaggatagaagaggagtttcggcgtcgggcgcgtgtttgcggtcgcgcgagtgttggcgaccgtgagttgaaggtgtgtgtggtgttgagtgtatggggcgtgtgggcgcagttcggtaatgatagggacttagggtgatagaagtgcaaagcatgactgtcaaatttttggagcaggttttctgacttcggtcggaaaacccctatttttgtggtgctaaaagttagattgcattccgcccttctcacgtctctttacgtgttgtttgcgaggcgtggcctcggaggtaaatggtctccttttacctcagataagcttacctttgctctgtgagtaagaatgtagctacacttccaaatttagctattgtcctttgcggtccaaatgaaaatattaccttccgatctaacaatgttaaactagtcccaggcccttctatcgattgccagaatagactagactactacacagacacaccctctcaaatcaggccagctcctgcaacctgcacctacagtttgtcccctgggacaaatgaaaggacaggccctctttcccccccccccccaaatcagagcacacacagatcttggggtctggggcagaaatttcgttcatggaaaaaacaaacaaacaaacaaacacgatcaaaggaagctcgttccctttggcctcagggtttcttagacgccgtgttccc

SEQ ID NO: 740 - DNA, 1084 bp, synthetic construct
  source 1..1084: mol_type = other DNA
gctcctcctaggagctaacactggagccagggggatcaaagctgtgtagtgagtgtcacaaaacatcctagcactaaggagactgagacgggaacattgtagtaagttctagcctgggctacagtaagagacgtagtctcaaacaaggaaatgcgctataaataaataagatggagcttcaatggtctgtgcataactggggggttgaaggagccttccaaaggctgggttccggctccgttcagtcgttgacttgagctgggcggggcatgcaaataaggacgccgcctggtctccgcggaactctgggaacgaaaagcgcaacaaaatcctctcggcccccttggattcctcgggctttccctggcgtaaaggtggtggacaggatagaagaggagtttcggcgtcgggcgcgtgtttgcggtcgcgcgagtgttggcgaccgtgagttgaaggtgtgtgtggtgttgagtgtatggggcgtgtgggcgcagttcggtaatgatagggacttagggtgatagaagtgcaaagcatgactgtcaaatttttggagcaggttttctgacttcggtcggaaaacccctataactggtaaccaaaagcagattactttcccccttgtggtcttcgcgtttgcggacgggagagaactttcggccattttccttttagaaatttaacttcttgaaggccaccaggtgacccttacttccctctcacctttccttctacctgtactttctctattaaaaagcctgcagaagtacccttgacaaattgccaaaaatgacacctaaaaaaaaaaaaaggaaaaacgacaccttaggtaattataggttgtaagaaaaagatttgacctcttggagtttttatttcttaataccaaaggacacccaaggaacgtatctctcaaaattgggtttcaaacctcagccgtttccttcttagttccagtgcttaacacgcaacagacctgcacaccactacactgcatacgagttttaaagttaataaatcagtcacccctccatagtcttctacctacttgaagacagaaacggctgctaggaagcaattcttc

SEQ ID NO: 741 - DNA, 1087 bp, synthetic construct
  source 1..1087: mol_type = other DNA
gctcctcctaggagctaacactggagccagggggatcaaagctgtgtagtgagtgtcacaaaacatcctagcactaaggagactgagacgggaacattgtagtaagttctagcctgggctacagtaagagacgtagtctcaaacaaggaaatgcgctataaataaataagatggagcttcaatggtctgtgcataactggggggttgaaggagccttccaaaggctgggttccggctccgttcagtcgttgacttgagctgggcggggcatgcaaataaggacgccgcctggtctccgcggaactctgggaacgaaaagcgcaacaaaatcctctcggcccccttggattcctcgggctttccctggcgtaaaggtggtggacaggatagaagaggagtttcggcgtcgggcgcgtgtttgcggtcgcgcgagtgttggcgaccgtgagttgaaggtgtgtgtggtgttgagtgtatggggcgtgtgggcgcagttcggtaatgatagggacttagggtgatagaagtgcaaagcatgactgtcaaatttttggagcaggttttctgacttcggtcggaaaacccctctggggaataagagtggtttaaagaaagaacaatttgagagatctgcttagatctaataaaacccaagtatagtttctttagacgtcttatatctcacgtaggacctcttatttcagactcactgcaagaacaagctaaagaactatatacagtcaggaacaaggtgagccatcgcggttctcagtcccatgatcttaagagtttttcctcttcccctcttccctggctgtcctggagctcactctgtagaccaggctggtctcaaactcagaaatccacttacctctgcctcccaagggctgggattaaaggcatgcaccaccattgcccggcagggtatgtggactatgctgtccttcaactcagagatcgtggtactttaaatctcattttccgaaagaaaagaaaagaaaggaaggggggaaataaagccagtatattttgcacccacaatctgaagttctacaaatattgttagaaaatgcaaaggacccaagtc

SEQ ID NO: 742 - DNA, 1087 bp, synthetic construct
  source 1..1087: mol_type = other DNA
gctcctcctaggagctaacactggagccagggggatcaaagctgtgtagtgagtgtcacaaaacatcctagcactaaggagactgagacgggaacattgtagtaagttctagcctgggctacagtaagagacgtagtctcaaacaaggaaatgcgctataaataaataagatggagcttcaatggtctgtgcataactggggggttgaaggagccttccaaaggctgggttccggctccgttcagtcgttgacttgagctgggcggggcatgcaaataaggacgccgcctggtctccgcggaactctgggaacgaaaagcgcaacaaaatcctctcggcccccttggattcctcgggctttccctggcgtaaaggtggtggacaggatagaagaggagtttcggcgtcgggcgcgtgtttgcggtcgcgcgagtgttggcgaccgtgagttgaaggtgtgtgtggtgttgagtgtatggggcgtgtgggcgcagttcggtaatgatagggacttagggtgatagaagtgcaaagcatgactgtcaaatttttggagcaggttttctgacttcggtcggaaaacccctctcggtttatcttaaagggttttaaatatagaaagcttccttagtcttatgggtgagagtgctgtttaagccttacctaggtatgtctttgaacatttattacagattgttatttgtgactatgaccactcaggtgttctgttcttgtgaatttagacacactcagaaaggctacacactcaaagaccacaccaaagtgaagtactatctgggccgtgaaactggtcacatatcagttattttgcagtaaaacaaggaagtcaatcatactgcttcagtgggtcagggagtcaagaatgcacagtacaagagctggtgagattcctcagcaggtaagagcactgaatgctcttccaaagattctgagttcaaatcccagcaaccacgtggtggatttgaacaaaggatgaaaacaaccatccataaccagatctgatgccctcttctggagtgtcaaaagacagctatggtgtacttacataaataaataagtaaaaaca

SEQ ID NO: 743 - DNA, 1087 bp, synthetic construct
  source 1..1087: mol_type = other DNA
gctcctcctaggagctaacactggagccagggggatcaaagctgtgtagtgagtgtcacaaaacatcctagcactaaggagactgagacgggaacattgtagtaagttctagcctgggctacagtaagagacgtagtctcaaacaaggaaatgcgctataaataaataagatggagcttcaatggtctgtgcataactggggggttgaaggagccttccaaaggctgggttccggctccgttcagtcgttgacttgagctgggcggggcatgcaaataaggacgccgcctggtctccgcggaactctgggaacgaaaagcgcaacaaaatcctctcggcccccttggattcctcgggctttccctggcgtaaaggtggtggacaggatagaagaggagtttcggcgtcgggcgcgtgtttgcggtcgcgcgagtgttggcgaccgtgagttgaaggtgtgtgtggtgttgagtgtatggggcgtgtgggcgcagttcggtaatgatagggacttagggtgatagaagtgcaaagcatgactgtcaaatttttggagcaggttttctgacttcggtcggaaaacccctccacattttgtgtttaaaaatagaaatatttaagtgagatcagtttaaatctgctttatctagggtgtctaactgcttgcatctttttaacttttccttatttgtgagaaggtctgtaaaacttattatatgttagtacactgtagctgtcttcagacactccagaagagggattcagatcaccttacagatggttttgagccaccatgtggttgctgggatttgaactcaggacctttagaaaagtagttgggtgctcttacccgctgagccatctcaccagccctttttttttcttttttccagttcgggtttctctgtgtgtagccctggctgtcctggaactcattctgtagaccgggctggcctcgaactcagaaatctgcctgcctctgcctcccaagtgctgggattaaaggaatgtgccttcattgcccggctctagggctttttgttgttgtttgtttgtttgtttgtttgtttgcttttgtggatggcct

SEQ ID NO: 744 - DNA, 1087 bp, synthetic construct
  source 1..1087: mol_type = other DNA
gctcctcctaggagctaacactggagccagggggatcaaagctgtgtagtgagtgtcacaaaacatcctagcactaaggagactgagacgggaacattgtagtaagttctagcctgggctacagtaagagacgtagtctcaaacaaggaaatgcgctataaataaataagatggagcttcaatggtctgtgcataactggggggttgaaggagccttccaaaggctgggttccggctccgttcagtcgttgacttgagctgggcggggcatgcaaataaggacgccgcctggtctccgcggaactctgggaacgaaaagcgcaacaaaatcctctcggcccccttggattcctcgggctttccctggcgtaaaggtggtggacaggatagaagaggagtttcggcgtcgggcgcgtgtttgcggtcgcgcgagtgttggcgaccgtgagttgaaggtgtgtgtggtgttgagtgtatggggcgtgtgggcgcagttcggtaatgatagggacttagggtgatagaagtgcaaagcatgactgtcaaatttttggagcaggttttctgacttcggtcggaaaacccctaaaaccagtaagggagaaaggtcaagtaacatataaaggaaggcctatcagaattacaccagacttttcaccagagactatgaaagccagaagagcctggacagatgttatacagacactaagagaacacaaatgccagcccaggctactatacctggccaaactctcaattaccatagatggagaaaccaaagtattccacgacaaaaacaaattcacacaatatctttccacgaatccagcccttcaaaggataatgacagaaaagaagcaatacaaggacggaaatcacgccctagaacaaccaagaaactaatcattcaacaaaccaaaaagaagacagccacaagaacagaatgccaactctaacaacaaaaataaaaggaagcaacaattacttttccttaatatctcttaatatcaatggactcaattccccaataaaaagacatagactaacagactggctacacaaacaggacccaacattctgctgctta

SEQ ID NO: 745 - DNA, 1087 bp, synthetic construct
  source 1..1087: mol_type = other DNA
gctcctcctaggagctaacactggagccagggggatcaaagctgtgtagtgagtgtcacaaaacatcctagcactaaggagactgagacgggaacattgtagtaagttctagcctgggctacagtaagagacgtagtctcaaacaaggaaatgcgctataaataaataagatggagcttcaatggtctgtgcataactggggggttgaaggagccttccaaaggctgggttccggctccgttcagtcgttgacttgagctgggcggggcatgcaaataaggacgccgcctggtctccgcggaactctgggaacgaaaagcgcaacaaaatcctctcggcccccttggattcctcgggctttccctggcgtaaaggtggtggacaggatagaagaggagtttcggcgtcgggcgcgtgtttgcggtcgcgcgagtgttggcgaccgtgagttgaaggtgtgtgtggtgttgagtgtatggggcgtgtgggcgcagttcggtaatgatagggacttagggtgatagaagtgcaaagcatgactgtcaaatttttggagcaggttttctgacttcggtcggaaaacccctcccaatttcactggtctacaatgaaagcaaaacagttctcttccccgctccccggtgtgtgagaggggctttgatccttctctggtttcctaggaaacgcgtatgtgctagagccacgctctgagacttccgcctcgtgcggtcccgcttcctttctgcctcctctggcctgcatccgtgggggaggtggctggctgcagggttctccggatctcttctgtgttcccactactcaagcaccgagtggcgttctatggcgtccgcctcggctcagcccgcggccctgagcgcggagcaggccaagggtgaggaaagagcctagtctgggtgtgggccgtcttctggggggagggcgcgatactattctttgcctctccaagtggggcccttgcccattagggcgaagggttgggaggacaagcttatcgggttgcttgcaggcctcggcccactaattccctgcctcttccctcctctgggctcgcccgccgtcctccgcg

SEQ ID NO: 746 - DNA, 1087 bp, synthetic construct
  source 1..1087: mol_type = other DNA
gctcctcctaggagctaacactggagccagggggatcaaagctgtgtagtgagtgtcacaaaacatcctagcactaaggagactgagacgggaacattgtagtaagttctagcctgggctacagtaagagacgtagtctcaaacaaggaaatgcgctataaataaataagatggagcttcaatggtctgtgcataactggggggttgaaggagccttccaaaggctgggttccggctccgttcagtcgttgacttgagctgggcggggcatgcaaataaggacgccgcctggtctccgcggaactctgggaacgaaaagcgcaacaaaatcctctcggcccccttggattcctcgggctttccctggcgtaaaggtggtggacaggatagaagaggagtttcggcgtcgggcgcgtgtttgcggtcgcgcgagtgttggcgaccgtgagttgaaggtgtgtgtggtgttgagtgtatggggcgtgtgggcgcagttcggtaatgatagggacttagggtgatagaagtgcaaagcatgactgtcaaatttttggagcaggttttctgacttcggtcggaaaacccctgaatttgttaaattacaggaggaagcttttttagttcattttacaaatactttcttgttaggtagataataccttctaaggttattatctggatcttctaagtctttttatcgctagcaagtctaagtttctggactttggaattagaagttaatgtcgtaggcgggcatggtggtccacgcctttaatcccagagtttgggaggcagacgcaggtggttttctgagttcgaggccatcctgctcttcaatgttagttccaggacagccagggttatacaaagaaaccctgtctcgagaaacaaaacaaacaaaaaaagagtagctgagtgctctgagttgtctctccagccccttagctatttattttcatttaaattatttttgttttattcgcttgtgtgcctgagtttgaatttcccgggattaacagttgaagactagggctggtgagatggctcagcggttaagattgccgactgctcttccaaaggtcctgag

SEQ ID NO: 747 - DNA, 1087 bp, synthetic construct
  source 1..1087: mol_type = other DNA
gctcctcctaggagctaacactggagccagggggatcaaagctgtgtagtgagtgtcacaaaacatcctagcactaaggagactgagacgggaacattgtagtaagttctagcctgggctacagtaagagacgtagtctcaaacaaggaaatgcgctataaataaataagatggagcttcaatggtctgtgcataactggggggttgaaggagccttccaaaggctgggttccggctccgttcagtcgttgacttgagctgggcggggcatgcaaataaggacgccgcctggtctccgcggaactctgggaacgaaaagcgcaacaaaatcctctcggcccccttggattcctcgggctttccctggcgtaaaggtggtggacaggatagaagaggagtttcggcgtcgggcgcgtgtttgcggtcgcgcgagtgttggcgaccgtgagttgaaggtgtgtgtggtgttgagtgtatggggcgtgtgggcgcagttcggtaatgatagggacttagggtgatagaagtgcaaagcatgactgtcaaatttttggagcaggttttctgacttcggtcggaaaacccctaccccctaattctacaagaatagaaagcttagcagctcctctgaatggttgctctcaggtgctagtggttgcaagtcgtatgttgatgcctgcctttgccctacctggtgtgtgagcgtgagcgcgccccacctctccagcctctctcttactgtttttcagacaagatgggactgttgttctcctactgctatgtacctcaatttcaattgatcatgcctggacataactgcccatgttgtaaggtcgtctacgttgtaaggtcgtgctcagtttctgatgcctagactagtcacctttccgtttgcctcctgactgtgtaaatgaggcaaatgaaggtggtctcttaactgacatgttagtgtttgacctatgggatagtttctcattgttgagacagaatttctagaagctggtccgctgagcggctaagagcacttgctgatattgcaaaggatctacctgggtttggttctcagcactcacatggaagttcacat

SEQ ID NO: 748 - DNA, 654 bp, synthetic construct
  source 1..654: mol_type = other DNA
gctcctcctaggagctaacactggagccagggggatcaaagctgtgtagtgagtgtcacaaaacatcctagcactaaggagactgagacgggaacattgtagtaagttctagcctgggctacagtaagagacgtagtctcaaacaaggaaatgcgctataaataaataagatggagcttcaatggtctgtgcataactggggggttgaaggagccttccaaaggctgggttccggctccgttcagtcgttgacttgagctgggcggggcatgcaaataaggacgccgcctggtctccgcggaactctgggaacgaaaagcgcaacaaaatcctctcggcccccttggattcctcgggctttccctggcgtaaaggtggtggacaggatagaagaggagtttcggcgtcgggcgcgtgtttgcggtcgcgcgagtgttggcgaccgtgagttgaaggtgtgtgtggtgttgagtgtatggggcgtgtgggcgcagttcggtaatgatagggacttagggtgatagaagtgcaaagcatgactgtcaaatttttggagcaggttttctgacttcggtcggaaaaccccttgtagttcctgcaatttaattttcgtttaaaactttattttattctttaacttaaaaaaaatatata

SEQ ID NO: 749 - DNA, 533 bp, synthetic construct; identical to SEQ ID NO: 365
  source 1..533: mol_type = other DNA

SEQ ID NO: 750 - DNA, 559 bp, synthetic construct; identical to SEQ ID NO: 366
  source 1..559: mol_type = other DNA

SEQ ID NO: 751 - DNA, 539 bp, synthetic construct; identical to SEQ ID NO: 367
  source 1..539: mol_type = other DNA

SEQ ID NO: 752 - DNA, 533 bp, synthetic construct; identical to SEQ ID NO: 368
  source 1..533: mol_type = other DNA

SEQ ID NO: 753 - DNA, 1088 bp, synthetic construct
  source 1..1088: mol_type = other DNA
acagaatttactaaatagagagtgcagtcatggaattgccattttccccacgtggtttttcgtttgttcctcaccggaggcctccggtttgagcccgaagtctaaaccggtgcgcgtctgcgagctcgcgtgcgcctccgcggccggagcacagtcgcgggcgggcatcagggcggtgcgtggccgtcagtgacgcatgacccttcgcaggcagaagtgggacgggtcaagagaggactgtgatccgattggctgttcggcgaccgtatgctaatcgcggtgacagtctgcgtggtgtagggacacggtagcgactcaaaatgccccgtggacggggtctggagaggtgtcggtctgtcagagaaggtgtccccgcgagggcagacgcggtgtgagatagaggcgcggacagggatgtcacgggtcgtctgtgcgtcagtcgccgtgactaagatgtgggggcggccggtgcagtgcggcgcggtgtggagcgtgaggtttaatgatagggacttagggtgatagaagtgcaaagcatgactgtcaaatttttggagcaggttttctgacttcggtcggaaaacccctactttctggagtttcaaaaacagactgtacgccaagggtcatatctttttttgtattggtttgtgtcttggttggtgtcttaggtgttaatcctacagtggagggtttatgggaataggaagtaacatgtcgcctgcatgtcataggagaaaaagcgagcatcagccgtatcggctttgtaacacaaattagctatcgtgaagtccgctcagctcttccctttctaccctggctgctttttgcagggattggtccgtggtctccagtctcttgggttctcaccctgtgtgaaaatcttcgtgtttttccctaccccccagtcacctcttacacagcctctgcttccaagcgcagcccccacaggagtttgtaggatttctgtgctagcggggaatgtgttctcacctcatagagccaggtagaaattatgcagatgggcagttctctgggaagaaagcagggcctttggggctctcagtgtccccgttgggttgtagaca

SEQ ID NO: 754 - DNA, 1088 bp, synthetic construct
  source 1..1088: mol_type = other DNA
acagaatttactaaatagagagtgcagtcatggaattgccattttccccacgtggtttttcgtttgttcctcaccggaggcctccggtttgagcccgaagtctaaaccggtgcgcgtctgcgagctcgcgtgcgcctccgcggccggagcacagtcgcgggcgggcatcagggcggtgcgtggccgtcagtgacgcatgacccttcgcaggcagaagtgggacgggtcaagagaggactgtgatccgattggctgttcggcgaccgtatgctaatcgcggtgacagtctgcgtggtgtagggacacggtagcgactcaaaatgccccgtggacggggtctggagaggtgtcggtctgtcagagaaggtgtccccgcgagggcagacgcggtgtgagatagaggcgcggacagggatgtcacgggtcgtctgtgcgtcagtcgccgtgactaagatgtgggggcggccggtgcagtgcggcgcggtgtggagcgtgaggtttaatgatagggacttagggtgatagaagtgcaaagcatgactgtcaaatttttggagcaggttttctgacttcggtcggaaaacccctactttctggagtttctaaaagtagactgtacgctaagggtcatatctttttttgttttggtttgtgtcttggttggcgtcttaaatgttaatcctacagtggagggctggcgaataggaagtaacatgtcgcctgcacgccataggagaaaaagcgagcatcagccgtatcggctttgtaacacaaattagctatcgtgaagtccgctcagctcttccctttctaccctggctgctttttgcagggattggtccgtggtctccagtctcttgggttctcaccctgtgtgaaaatcttcctgtttttccctaccccccaagtcacctcttacacagcctctgcttccaagcgcagcccccacaggagtttgtaggatttctgtgctagcggggagtgtgttctcacctcatagagccaggtagaaactacgcagatgggtgctgttctccaggaagaaagcagggcctttggggctctcagtgtccccgttgggttgtaga

SEQ ID NO: 755 - DNA, 1088 bp, synthetic construct
  source 1..1088: mol_type = other DNA
acagaatttactaaatagagagtgcagtcatggaattgccattttccccacgtggtttttcgtttgttcctcaccggaggcctccggtttgagcccgaagtctaaaccggtgcgcgtctgcgagctcgcgtgcgcctccgcggccggagcacagtcgcgggcgggcatcagggcggtgcgtggccgtcagtgacgcatgacccttcgcaggcagaagtgggacgggtcaagagaggactgtgatccgattggctgttcggcgaccgtatgctaatcgcggtgacagtctgcgtggtgtagggacacggtagcgactcaaaatgccccgtggacggggtctggagaggtgtcggtctgtcagagaaggtgtccccgcgagggcagacgcggtgtgagatagaggcgcggacagggatgtcacgggtcgtctgtgcgtcagtcgccgtgactaagatgtgggggcggccggtgcagtgcggcgcggtgtggagcgtgaggtttaatgatagggacttagggtgatagaagtgcaaagcatgactgtcaaatttttggagcaggttttctgacttcggtcggaaaacccctactttctggagtttcaaaaacagaccgtacgccaagggtcatgtcttttttcgtattggtttgtgtcttagttgttaatcctacagtggaggcctggggaataagaagtaacatgtggcctgcacgccataggagaaaaagcgagcatcagccgtatcggctttgtaacacaaattagctatcgtgaagtccgctcagctcttccatttctaccctggctgctttttgcagggattggtccgtggtctccagtctcttgggttctcaccctgtgtgaaaatcttcgtgtttttccctaccccccaagtcacctcttacacagcctctgcttccaagcgcagcccccacaggagtttgtaggatttctgtgctagcggggagtgtgttctcacctcatagagccaggtagaaattatgcagatgggcgctgttctctgggaagaaagcagggcctttggggctctcagtgtccccgttgggttgtagacataacactctta

SEQ ID NO: 756 - DNA, 892 bp, synthetic construct
  source 1..892: mol_type = other DNA
acagaatttactaaatagagagtgcagtcatggaattgccattttccccacgtggtttttcgtttgttcctcaccggaggcctccggtttgagcccgaagtctaaaccggtgcgcgtctgcgagctcgcgtgcgcctccgcggccggagcacagtcgcgggcgggcatcagggcggtgcgtggccgtcagtgacgcatgacccttcgcaggcagaagtgggacgggtcaagagaggactgtgatccgattggctgttcggcgaccgtatgctaatcgcggtgacagtctgcgtggtgtagggacacggtagcgactcaaaatgccccgtggacggggtctggagaggtgtcggtctgtcagagaaggtgtccccgcgagggcagacgcggtgtgagatagaggcgcggacagggatgtcacgggtcgtctgtgcgtcagtcgccgtgactaagatgtgggggcggccggtgcagtgcggcgcggtgtggagcgtgaggtttaatgatagggacttagggtgatagaagtgcaaagcatgactgtcaaatttttggagcaggttttctgacttcggtcggaaaacccctcctccggggatacaacgtgtttcctaaaagtagagggaggtaagagacggtagcacctgcggggcggcttgcacgccgagtgcctgtgacgcgccggcttaacttaactgcttccctgaagtaccttgaggttcctgatgtgcgggcggtagacggtaggcttatgcggcacgctgtcgtttccaccgtggctactgcgctttgggaaggccacgacctcctcctttggggaggtccttaggatctcagcttggcagtcgagtgggtggcgaccttttaaaggaatgggacccacccggagttc

SEQ ID NO: 757 - DNA, 1080 bp, synthetic construct
  source 1..1080: mol_type = other DNA
acagaatttactaaatagagagtgcagtcatggaattgccattttccccacgtggtttttcgtttgttcctcaccggaggcctccggtttgagcccgaagtctaaaccggtgcgcgtctgcgagctcgcgtgcgcctccgcggccggagcacagtcgcgggcgggcatcagggcggtgcgtggccgtcagtgacgcatgacccttcgcaggcagaagtgggacgggtcaagagaggactgtgatccgattggctgttcggcgaccgtatgctaatcgcggtgacagtctgcgtggtgtagggacacggtagcgactcaaaatgccccgtggacggggtctggagaggtgtcggtctgtcagagaaggtgtccccgcgagggcagacgcggtgtgagatagaggcgcggacagggatgtcacgggtcgtctgtgcgtcagtcgccgtgactaagatgtgggggcggccggtgcagtgcggcgcggtgtggagcgtgaggtttaatgatagggacttagggtgatagaagtgcaaagcatgactgtcaaatttttggagcaggttttctgacttcggtcggaaaacccctttcccttcttgtaatacaaaataataacaaccacagaggacatcgcaagtaaaatgtgtataacaaccccatctaaagaaccctatcatctttctactatctgtctacctaaatatgtatagtataaataaccctatatagcactctaagcaacttaagttaggtaacttagaaaactcttttttttttttgagactgagtctcactctgtcgcacccaggctggagtgcagtggcgtgatctcggctcactgcaacctccaccttctgggttcaagtgattctcccatctcagtctcccaagtagctgggattacaggcacgccaccatgccctgctacatttttttttttttagtagagatgaggtttcaccacattggccaggctgttctcgaactcctgacctcaggtgatccgcccaccttggcctcatgaagtgctgggattacaggtgtgagccactgtacccagccagaaaactcttaaaaaac

SEQ ID NO: 758 - DNA, 970 bp, synthetic construct
  source 1..970: mol_type = other DNA
acagaatttactaaatagagagtgcagtcatggaattgccattttccccacgtggtttttcgtttgttcctcaccggaggcctccggtttgagcccgaagtctaaaccggtgcgcgtctgcgagctcgcgtgcgcctccgcggccggagcacagtcgcgggcgggcatcagggcggtgcgtggccgtcagtgacgcatgacccttcgcaggcagaagtgggacgggtcaagagaggactgtgatccgattggctgttcggcgaccgtatgctaatcgcggtgacagtctgcgtggtgtagggacacggtagcgactcaaaatgccccgtggacggggtctggagaggtgtcggtctgtcagagaaggtgtccccgcgagggcagacgcggtgtgagatagaggcgcggacagggatgtcacgggtcgtctgtgcgtcagtcgccgtgactaagatgtgggggcggccggtgcagtgcggcgcggtgtggagcgtgaggtttaatgatagggacttagggtgatagaagtgcaaagcatgactgtcaaatttttggagcaggttttctgacttcggtcggaaaacccctctgaattttcttgcagttgaacaacagaggctttttttgtgtgtgtgggggtgcttggttttgggaggttgaagagtacttgttcgcaaactctctaaatgagagatggggaagtgtcttaccagctgattcgcgagagcacctgcaagtttacctgttttagtgatttgcgtttatgaaagttggagttgctgattttgtgatctctacttttaaggtaaaagcagggcggtgttgacttttcttgccagttggctgtcctgttttctttctcgcactgttttctttttgagacgaagtctgtcgctcaggctggagtgcactggcgtgatctcggctcgctgcaaactttgccgaacccctgtttagcgatttccgtttg

SEQ ID NO: 759 - DNA, 1088 bp, synthetic construct
  source 1..1088: mol_type = other DNA
acagaatttactaaatagagagtgcagtcatggaattgccattttccccacgtggtttttcgtttgttcctcaccggaggcctccggtttgagcccgaagtctaaaccggtgcgcgtctgcgagctcgcgtgcgcctccgcggccggagcacagtcgcgggcgggcatcagggcggtgcgtggccgtcagtgacgcatgacccttcgcaggcagaagtgggacgggtcaagagaggactgtgatccgattggctgttcggcgaccgtatgctaatcgcggtgacagtctgcgtggtgtagggacacggtagcgactcaaaatgccccgtggacggggtctggagaggtgtcggtctgtcagagaaggtgtccccgcgagggcagacgcggtgtgagatagaggcgcggacagggatgtcacgggtcgtctgtgcgtcagtcgccgtgactaagatgtgggggcggccggtgcagtgcggcgcggtgtggagcgtgaggtttaatgatagggacttagggtgatagaagtgcaaagcatgactgtcaaatttttggagcaggttttctgacttcggtcggaaaacccctatatgtggtaatccaacaatagaaattatttttaagtttgtgtgttcctttttctgttcaatggtgcttttgatattgttgtaaagcagtgactagcagattctgtgtggtaaaagcactgaaccctgtttagttcttttctccctaccttattggtaattatttctgtgtatatatgttccaaagaaatgcggcttgtatattcatgcttttcaactttttgtgatagacagttgatacacaagtagtacctcctccgggatcttcttagtcaagactgtttggtagatgcatgttttttgttacttgtaatgtacagtattcagttcattttctttttgcagcactgtccggttgaaacacaacgcgaggatcgggcgtggtggctcacgcctgtaatcccagcactttgggaggccgaggcaggacaatcaagaccaatcctggtcatcaaggcaggagaatcaagaccatcgaggtcaggagatcaagaccatcct

SEQ ID NO: 760 - DNA, 1086 bp, synthetic construct
  source 1..1086: mol_type = other DNA
acagaatttactaaatagagagtgcagtcatggaattgccattttccccacgtggtttttcgtttgttcctcaccggaggcctccggtttgagcccgaagtctaaaccggtgcgcgtctgcgagctcgcgtgcgcctccgcggccggagcacagtcgcgggcgggcatcagggcggtgcgtggccgtcagtgacgcatgacccttcgcaggcagaagtgggacgggtcaagagaggactgtgatccgattggctgttcggcgaccgtatgctaatcgcggtgacagtctgcgtggtgtagggacacggtagcgactcaaaatgccccgtggacggggtctggagaggtgtcggtctgtcagagaaggtgtccccgcgagggcagacgcggtgtgagatagaggcgcggacagggatgtcacgggtcgtctgtgcgtcagtcgccgtgactaagatgtgggggcggccggtgcagtgcggcgcggtgtggagcgtgaggtttaatgatagggacttagggtgatagaagtgcaaagcatgactgtcaaatttttggagcaggttttctgacttcggtcggaaaacccctacatcaggttgtttttctgtttttacatcaggttgtttttctgtttggttttttttttacaccacgtttatacgccggtgcacggtttaccactgaaaacacctttcatctacaggtgatatcttttaacacaaataaaatgtagtagtcctaggagacggaatagaaggaggtggggcctaggcagattcatctctgcggtgcattttgcctctggccctcgggccctagtttgcgatctttcccatcttgcctctgcttccctctgcacaatcctgagtattgcagtaccttacacttaaggaaatttcgtcttgccaaagttgatccatttcagctccgaaacataacaggaactagtgcaacgataaacgtatgaggaacttgcaataagagtgacagaatcctttgaatcaaaaaaaaaaaaagccaccacttaatgagtatctaccatatgtcaagggcttcaccaatatttcattgaaatattccagacca

SEQ ID NO: 761 - DNA, 1088 bp, synthetic construct
  source 1..1088: mol_type = other DNA
acagaatttactaaatagagagtgcagtcatggaattgccattttccccacgtggtttttcgtttgttcctcaccggaggcctccggtttgagcccgaagtctaaaccggtgcgcgtctgcgagctcgcgtgcgcctccgcggccggagcacagtcgcgggcgggcatcagggcggtgcgtggccgtcagtgacgcatgacccttcgcaggcagaagtgggacgggtcaagagaggactgtgatccgattggctgttcggcgaccgtatgctaatcgcggtgacagtctgcgtggtgtagggacacggtagcgactcaaaatgccccgtggacggggtctggagaggtgtcggtctgtcagagaaggtgtccccgcgagggcagacgcggtgtgagatagaggcgcggacagggatgtcacgggtcgtctgtgcgtcagtcgccgtgactaagatgtgggggcggccggtgcagtgcggcgcggtgtggagcgtgaggtttaatgatagggacttagggtgatagaagtgcaaagcatgactgtcaaatttttggagcaggttttctgacttcggtcggaaaacccctcttatgatgtttgttgccaatgatagattgttttcactgtgcaaaaattatgggtagttttggtggtcttgatgcagttgtaagcttggggtatgaaggtttgggccacgcctgggcgcttccggctgcgccggatgctgtttcctttccgctcccaggggcgttgggaacggttgtaggacgtggctctttattcgtgagttttccatttacctccgctgaacctagagcttcagacgccctatggcgtccgcctcgacccaaccggcggccttgagcgctgagcaagcaaagggtgagaatcgtcctagtcaaggcataggctgctggcctggggtagtcaaggcatgggctgctggtctggggaggatgcgggcggaggatgtggggcgacaaacctggctacgtccgccgggaaaatggggtaggggacgccgggtaccgtccttctaagtggggcgcttgcccccaagacttgggatcttattgggttacctaca

SEQ ID NO: 762 - DNA, 1086 bp, synthetic construct
  source 1..1086: mol_type = other DNA
acagaatttactaaatagagagtgcagtcatggaattgccattttccccacgtggtttttcgtttgttcctcaccggaggcctccggtttgagcccgaagtctaaaccggtgcgcgtctgcgagctcgcgtgcgcctccgcggccggagcacagtcgcgggcgggcatcagggcggtgcgtggccgtcagtgacgcatgacccttcgcaggcagaagtgggacgggtcaagagaggactgtgatccgattggctgttcggcgaccgtatgctaatcgcggtgacagtctgcgtggtgtagggacacggtagcgactcaaaatgccccgtggacggggtctggagaggtgtcggtctgtcagagaaggtgtccccgcgagggcagacgcggtgtgagatagaggcgcggacagggatgtcacgggtcgtctgtgcgtcagtcgccgtgactaagatgtgggggcggccggtgcagtgcggcgcggtgtggagcgtgaggtttaatgatagggacttagggtgatagaagtgcaaagcatgactgtcaaatttttggagcaggttttctgacttcggtcggaaaaccccttctttactgttatatgttaggcgaaatattacgcgtttggagtaagtggtgctttttgtaactgaaaagagattctgtgtgtgtttttttttttttagaggctgcatagttatttgtatgaaccgcaggtgacctaattagcaaggtaattcagacctgtatcctagcacttaagaagtggaagtgggataaccctgcgtgttctcgtgtgggaggctagcttaagcaacaaagcaggaaggccccaccaacaaaagaatttaaaaattatacgtgcgtggtggcgcgcgtatgaggaaattatttggcaactgtgttacagtatagcagcaaatggaatagacctagtccctgactttaggagacctgcctcagccccccgaatggctgggactacaggcgtgcgcctccgcgcccagctaatttttgcatttttggtagagacgggttcaccatgttggccaggatggtctccatctcttcatctggtgatccgcc

SEQ ID NO: 763 - DNA, 1088 bp, synthetic construct
  source 1..1088: mol_type = other DNA
acagaatttactaaatagagagtgcagtcatggaattgccattttccccacgtggtttttcgtttgttcctcaccggaggcctccggtttgagcccgaagtctaaaccggtgcgcgtctgcgagctcgcgtgcgcctccgcggccggagcacagtcgcgggcgggcatcagggcggtgcgtggccgtcagtgacgcatgacccttcgcaggcagaagtgggacgggtcaagagaggactgtgatccgattggctgttcggcgaccgtatgctaatcgcggtgacagtctgcgtggtgtagggacacggtagcgactcaaaatgccccgtggacggggtctggagaggtgtcggtctgtcagagaaggtgtccccgcgagggcagacgcggtgtgagatagaggcgcggacagggatgtcacgggtcgtctgtgcgtcagtcgccgtgactaagatgtgggggcggccggtgcagtgcggcgcggtgtggagcgtgaggtttaatgatagggacttagggtgatagaagtgcaaagcatgactgtcaaatttttggagcaggttttctgacttcggtcggaaaacccctaccttattcacgcctaaaaagtagactgactgtggggtggtcgtgttttttgtttcttgttggtaggtggtgaatgcgtttttttcgttgttttctccgttactcaggctgccagttgcttggcagtcttgtcgctggctgtggacgctctgcacttcatcaccgtccccagctgcgctttgagccggtctaaggttgcccacagtattgacgttgggacccacgaaactggcaatttccatgtgtgcggccttacccagttctcccaaacttctgcgtataaccgcttctctgtgcttcagaaagataagtccggccccggcctcacacagcagctcagttcgtgacagcgtttaatatgtaaaatggagcaaataatttatagggcgttgggagagttaaagagactaattcatttacgtgttaaatacagggaatggcttttgcattgatataaccccagcctccagcatgcgccagacctgacgtaggtgttcggc

SEQ ID NO: 764 - DNA, 1088 bp, synthetic construct
  source 1..1088: mol_type = other DNA
acagaatttactaaatagagagtgcagtcatggaattgccattttccccacgtggtttttcgtttgttcctcaccggaggcctccggtttgagcccgaagtctaaaccggtgcgcgtctgcgagctcgcgtgcgcctccgcggccggagcacagtcgcgggcgggcatcagggcggtgcgtggccgtcagtgacgcatgacccttcgcaggcagaagtgggacgggtcaagagaggactgtgatccgattggctgttcggcgaccgtatgctaatcgcggtgacagtctgcgtggtgtagggacacggtagcgactcaaaatgccccgtggacggggtctggagaggtgtcggtctgtcagagaaggtgtccccgcgagggcagacgcggtgtgagatagaggcgcggacagggatgtcacgggtcgtctgtgcgtcagtcgccgtgactaagatgtgggggcggccggtgcagtgcggcgcggtgtggagcgtgaggtttaatgatagggacttagggtgatagaagtgcaaagcatgactgtcaaatttttggagcaggttttctgacttcggtcggaaaaccccttttgacccattacccatctaagttagatgcttttttaaatgttttttaatttttaaatttttaatttttttcattatttattttttatttttgagacggatctcggctcactgtaacctccacctcccgggttcaagcgattctcctgactcagcctcccgagtagctgggattacaggcgcgcgccaccatgcccggctaatttttctatttttagtaaagacggggtttcgccatgttgaccagggtggtcttgaactcctgacgtcaggtgatcctcctgcctcgtgctgggattgcaggcgtgagccaccgctcccggcccttagatgctttttaatcagcaagtacgcaatgctttcctgacaggaatgtcaagtccgtcaggaaatccacataagggtgttaagcaggcaaagtaccacatacagattaaaatcaaaagcactgtcaacgcttatttaatttatacagtagaccctaacttttctaattttgtg

SEQ ID NO: 765 - DNA, 1088 bp, synthetic construct
  source 1..1088: mol_type = other DNA
acagaatttactaaatagagagtgcagtcatggaattgccattttccccacgtggtttttcgtttgttcctcaccggaggcctccggtttgagcccgaagtctaaaccggtgcgcgtctgcgagctcgcgtgcgcctccgcggccggagcacagtcgcgggcgggcatcagggcggtgcgtggccgtcagtgacgcatgacccttcgcaggcagaagtgggacgggtcaagagaggactgtgatccgattggctgttcggcgaccgtatgctaatcgcggtgacagtctgcgtggtgtagggacacggtagcgactcaaaatgccccgtggacggggtctggagaggtgtcggtctgtcagagaaggtgtccccgcgagggcagacgcggtgtgagatagaggcgcggacagggatgtcacgggtcgtctgtgcgtcagtcgccgtgactaagatgtgggggcggccggtgcagtgcggcgcggtgtggagcgtgaggtttaatgatagggacttagggtgatagaagtgcaaagcatgactgtcaaatttttggagcaggttttctgacttcggtcggaaaacccctgtttacttggttttaaaaatagcttgcactagcgataccgcgaatatggttattaggtttgttaggcacagtcgtgtcttactatagaaaaataacgtagtgttcattttgctgcctgtatgtgttaatttgtccttattgcgccattgttcttgttaagtcttctgtaaggagttgcgggtttcaaactgtcagtctgagagcataagctcacttttcagtcagttgaattgaatgttacattcgattggttctggatattgatattacccaaggcttgtcctgtttgtaagtcttttcctacacctgacaatatgattatgtttacaatgtccctagaactctgggtgtatcgttcccactgaataaaatttgatctctaagttgacctataaatttaagtaccaaaaaactggtttgtaagattttggaaggcagaggcagggaagagaccaacgtggtctacatataaagtaccaggtacatataaagtaccaggt

SEQ ID NO: 766 - DNA, 1084 bp, synthetic construct
  source 1..1084: mol_type = other DNA
acagaatttactaaatagagagtgcagtcatggaattgccattttccccacgtggtttttcgtttgttcctcaccggaggcctccggtttgagcccgaagtctaaaccggtgcgcgtctgcgagctcgcgtgcgcctccgcggccggagcacagtcgcgggcgggcatcagggcggtgcgtggccgtcagtgacgcatgacccttcgcaggcagaagtgggacgggtcaagagaggactgtgatccgattggctgttcggcgaccgtatgctaatcgcggtgacagtctgcgtggtgtagggacacggtagcgactcaaaatgccccgtggacggggtctggagaggtgtcggtctgtcagagaaggtgtccccgcgagggcagacgcggtgtgagatagaggcgcggacagggatgtcacgggtcgtctgtgcgtcagtcgccgtgactaagatgtgggggcggccggtgcagtgcggcgcggtgtggagcgtgaggtttaatgatagggacttagggtgatagaagtgcaaagcatgactgtcaaatttttggagcaggttttctgacttcggtcggaaaacccctatttttgtggtgctaaaagttagattgcattccgcccttctcacgtctctttacgtgttgtttgcgaggcgtggcctcggaggtaaatggtctccttttacctcagataagcttacctttgctctgtgagtaagaatgtagctacacttccaaatttagctattgtcctttgcggtccaaatgaaaatattaccttccgatctaacaatgttaaactagtcccaggcccttctatcgattgccagaatagactagactactacacagacacaccctctcaaatcaggccagctcctgcaacctgcacctacagtttgtcccctgggacaaatgaaaggacaggccctctttcccccccccccccaaatcagagcacacacagatcttggggtctggggcagaaatttcgttcatggaaaaaacaaacaaacaaacaaacacgatcaaaggaagctcgttccctttggcctcagggtttcttagacgccgtgttccc

SEQ ID NO: 767 - DNA, 1085 bp, synthetic construct
  source 1..1085: mol_type = other DNA
acagaatttactaaatagagagtgcagtcatggaattgccattttccccacgtggtttttcgtttgttcctcaccggaggcctccggtttgagcccgaagtctaaaccggtgcgcgtctgcgagctcgcgtgcgcctccgcggccggagcacagtcgcgggcgggcatcagggcggtgcgtggccgtcagtgacgcatgacccttcgcaggcagaagtgggacgggtcaagagaggactgtgatccgattggctgttcggcgaccgtatgctaatcgcggtgacagtctgcgtggtgtagggacacggtagcgactcaaaatgccccgtggacggggtctggagaggtgtcggtctgtcagagaaggtgtccccgcgagggcagacgcggtgtgagatagaggcgcggacagggatgtcacgggtcgtctgtgcgtcagtcgccgtgactaagatgtgggggcggccggtgcagtgcggcgcggtgtggagcgtgaggtttaatgatagggacttagggtgatagaagtgcaaagcatgactgtcaaatttttggagcaggttttctgacttcggtcggaaaacccctataactggtaaccaaaagcagattactttcccccttgtggtcttcgcgtttgcggacgggagagaactttcggccattttccttttagaaatttaacttcttgaaggccaccaggtgacccttacttccctctcacctttccttctacctgtactttctctattaaaaagcctgcagaagtacccttgacaaattgccaaaaatgacacctaaaaaaaaaaaaaggaaaaacgacaccttaggtaattataggttgtaagaaaaagatttgacctcttggagtttttatttcttaataccaaaggacacccaaggaacgtatctctcaaaattgggtttcaaacctcagccgtttccttcttagttccagtgcttaacacgcaacagacctgcacaccactacactgcatacgagttttaaagttaataaatcagtcacccctccatagtcttctacctacttgaagacagaaacggctgctaggaagcaattcttc

SEQ ID NO: 768 - DNA, 1088 bp, synthetic construct
  source 1..1088: mol_type = other DNA
acagaatttactaaatagagagtgcagtcatggaattgccattttccccacgtggtttttcgtttgttcctcaccggaggcctccggtttgagcccgaagtctaaaccggtgcgcgtctgcgagctcgcgtgcgcctccgcggccggagcacagtcgcgggcgggcatcagggcggtgcgtggccgtcagtgacgcatgacccttcgcaggcagaagtgggacgggtcaagagaggactgtgatccgattggctgttcggcgaccgtatgctaatcgcggtgacagtctgcgtggtgtagggacacggtagcgactcaaaatgccccgtggacggggtctggagaggtgtcggtctgtcagagaaggtgtccccgcgagggcagacgcggtgtgagatagaggcgcggacagggatgtcacgggtcgtctgtgcgtcagtcgccgtgactaagatgtgggggcggccggtgcagtgcggcgcggtgtggagcgtgaggtttaatgatagggacttagggtgatagaagtgcaaagcatgactgtcaaatttttggagcaggttttctgacttcggtcggaaaacccctctggggaataagagtggtttaaagaaagaacaatttgagagatctgcttagatctaataaaacccaagtatagtttctttagacgtcttatatctcacgtaggacctcttatttcagactcactgcaagaacaagctaaagaactatatacagtcaggaacaaggtgagccatcgcggttctcagtcccatgatcttaagagtttttcctcttcccctcttccctggctgtcctggagctcactctgtagaccaggctggtctcaaactcagaaatccacttacctctgcctcccaagggctgggattaaaggcatgcaccaccattgcccggcagggtatgtggactatgctgtccttcaactcagagatcgtggtactttaaatctcattttccgaaagaaaagaaaagaaaggaaggggggaaataaagccagtatattttgcacccacaatctgaagttctacaaatattgttagaaaatgcaaaggacccaagtc

SEQ ID NO: 769 - DNA, 1088 bp, synthetic construct
  source 1..1088: mol_type = other DNA
acagaatttactaaatagagagtgcagtcatggaattgccattttccccacgtggtttttcgtttgttcctcaccggaggcctccggtttgagcccgaagtctaaaccggtgcgcgtctgcgagctcgcgtgcgcctccgcggccggagcacagtcgcgggcgggcatcagggcggtgcgtggccgtcagtgacgcatgacccttcgcaggcagaagtgggacgggtcaagagaggactgtgatccgattggctgttcggcgaccgtatgctaatcgcggtgacagtctgcgtggtgtagggacacggtagcgactcaaaatgccccgtggacggggtctggagaggtgtcggtctgtcagagaaggtgtccccgcgagggcagacgcggtgtgagatagaggcgcggacagggatgtcacgggtcgtctgtgcgtcagtcgccgtgactaagatgtgggggcggccggtgcagtgcggcgcggtgtggagcgtgaggtttaatgatagggacttagggtgatagaagtgcaaagcatgactgtcaaatttttggagcaggttttctgacttcggtcggaaaacccctctcggtttatcttaaagggttttaaatatagaaagcttccttagtcttatgggtgagagtgctgtttaagccttacctaggtatgtctttgaacatttattacagattgttatttgtgactatgaccactcaggtgttctgttcttgtgaatttagacacactcagaaaggctacacactcaaagaccacaccaaagtgaagtactatctgggccgtgaaactggtcacatatcagttattttgcagtaaaacaaggaagtcaatcatactgcttcagtgggtcagggagtcaagaatgcacagtacaagagctggtgagattcctcagcaggtaagagcactgaatgctcttccaaagattctgagttcaaatcccagcaaccacgtggtggatttgaacaaaggatgaaaacaaccatccataaccagatctgatgccctcttctggagtgtcaaaagacagctatggtgtacttacataaataaataagtaaaaaca

SEQ ID NO: 770 - DNA, 1088 bp, synthetic construct
  source 1..1088: mol_type = other DNA
acagaatttactaaatagagagtgcagtcatggaattgccattttccccacgtggtttttcgtttgttcctcaccggaggcctccggtttgagcccgaagtctaaaccggtgcgcgtctgcgagctcgcgtgcgcctccgcggccggagcacagtcgcgggcgggcatcagggcggtgcgtggccgtcagtgacgcatgacccttcgcaggcagaagtgggacgggtcaagagaggactgtgatccgattggctgttcggcgaccgtatgctaatcgcggtgacagtctgcgtggtgtagggacacggtagcgactcaaaatgccccgtggacggggtctggagaggtgtcggtctgtcagagaaggtgtccccgcgagggcagacgcggtgtgagatagaggcgcggacagggatgtcacgggtcgtctgtgcgtcagtcgccgtgactaagatgtgggggcggccggtgcagtgcggcgcggtgtggagcgtgaggtttaatgatagggacttagggtgatagaagtgcaaagcatgactgtcaaatttttggagcaggttttctgacttcggtcggaaaacccctccacattttgtgtttaaaaatagaaatatttaagtgagatcagtttaaatctgctttatctagggtgtctaactgcttgcatctttttaacttttccttatttgtgagaaggtctgtaaaacttattatatgttagtacactgtagctgtcttcagacactccagaagagggattcagatcaccttacagatggttttgagccaccatgtggttgctgggatttgaactcaggacctttagaaaagtagttgggtgctcttacccgctgagccatctcaccagccctttttttttcttttttccagttcgggtttctctgtgtgtagccctggctgtcctggaactcattctgtagaccgggctggcctcgaactcagaaatctgcctgcctctgcctcccaagtgctgggattaaaggaatgtgccttcattgcccggctctagggctttttgttgttgtttgtttgtttgtttgtttgtttgcttttgtggatggcct

SEQ ID NO: 771 - DNA, 1088 bp, synthetic construct
  source 1..1088: mol_type = other DNA
acagaatttactaaatagagagtgcagtcatggaattgccattttccccacgtggtttttcgtttgttcctcaccggaggcctccggtttgagcccgaagtctaaaccggtgcgcgtctgcgagctcgcgtgcgcctccgcggccggagcacagtcgcgggcgggcatcagggcggtgcgtggccgtcagtgacgcatgacccttcgcaggcagaagtgggacgggtcaagagaggactgtgatccgattggctgttcggcgaccgtatgctaatcgcggtgacagtctgcgtggtgtagggacacggtagcgactcaaaatgccccgtggacggggtctggagaggtgtcggtctgtcagagaaggtgtccccgcgagggcagacgcggtgtgagatagaggcgcggacagggatgtcacgggtcgtctgtgcgtcagtcgccgtgactaagatgtgggggcggccggtgcagtgcggcgcggtgtggagcgtgaggtttaatgatagggacttagggtgatagaagtgcaaagcatgactgtcaaatttttggagcaggttttctgacttcggtcggaaaacccctaaaaccagtaagggagaaaggtcaagtaacatataaaggaaggcctatcagaattacaccagacttttcaccagagactatgaaagccagaagagcctggacagatgttatacagacactaagagaacacaaatgccagcccaggctactatacctggccaaactctcaattaccatagatggagaaaccaaagtattccacgacaaaaacaaattcacacaatatctttccacgaatccagcccttcaaaggataatgacagaaaagaagcaatacaaggacggaaatcacgccctagaacaaccaagaaactaatcattcaacaaaccaaaaagaagacagccacaagaacagaatgccaactctaacaacaaaaataaaaggaagcaacaattacttttccttaatatctcttaatatcaatggactcaattccccaataaaaagacatagactaacagactggctacacaaacaggacccaacattctgctgctta

SEQ ID NO: 772 - DNA, 1088 bp, synthetic construct
  source 1..1088: mol_type = other DNA
acagaatttactaaatagagagtgcagtcatggaattgccattttccccacgtggtttttcgtttgttcctcaccggaggcctccggtttgagcccgaagtctaaaccggtgcgcgtctgcgagctcgcgtgcgcctccgcggccggagcacagtcgcgggcgggcatcagggcggtgcgtggccgtcagtgacgcatgacccttcgcaggcagaagtgggacgggtcaagagaggactgtgatccgattggctgttcggcgaccgtatgctaatcgcggtgacagtctgcgtggtgtagggacacggtagcgactcaaaatgccccgtggacggggtctggagaggtgtcggtctgtcagagaaggtgtccccgcgagggcagacgcggtgtgagatagaggcgcggacagggatgtcacgggtcgtctgtgcgtcagtcgccgtgactaagatgtgggggcggccggtgcagtgcggcgcggtgtggagcgtgaggtttaatgatagggacttagggtgatagaagtgcaaagcatgactgtcaaatttttggagcaggttttctgacttcggtcggaaaacccctcccaatttcactggtctacaatgaaagcaaaacagttctcttccccgctccccggtgtgtgagaggggctttgatccttctctggtttcctaggaaacgcgtatgtgctagagccacgctctgagacttccgcctcgtgcggtcccgcttcctttctgcctcctctggcctgcatccgtgggggaggtggctggctgcagggttctccggatctcttctgtgttcccactactcaagcaccgagtggcgttctatggcgtccgcctcggctcagcccgcggccctgagcgcggagcaggccaagggtgaggaaagagcctagtctgggtgtgggccgtcttctggggggagggcgcgatactattctttgcctctccaagtggggcccttgcccattagggcgaagggttgggaggacaagcttatcgggttgcttgcaggcctcggcccactaattccctgcctcttccctcctctgggctcgcccgccgtcctccgcg

SEQ ID NO: 773 - DNA, 1088 bp, synthetic construct
  source 1..1088: mol_type = other DNA
acagaatttactaaatagagagtgcagtcatggaattgccattttccccacgtggtttttcgtttgttcctcaccggaggcctccggtttgagcccgaagtctaaaccggtgcgcgtctgcgagctcgcgtgcgcctccgcggccggagcacagtcgcgggcgggcatcagggcggtgcgtggccgtcagtgacgcatgacccttcgcaggcagaagtgggacgggtcaagagaggactgtgatccgattggctgttcggcgaccgtatgctaatcgcggtgacagtctgcgtggtgtagggacacggtagcgactcaaaatgccccgtggacggggtctggagaggtgtcggtctgtcagagaaggtgtccccgcgagggcagacgcggtgtgagatagaggcgcggacagggatgtcacgggtcgtctgtgcgtcagtcgccgtgactaagatgtgggggcggccggtgcagtgcggcgcggtgtggagcgtgaggtttaatgatagggacttagggtgatagaagtgcaaagcatgactgtcaaatttttggagcaggttttctgacttcggtcggaaaacccctgaatttgttaaattacaggaggaagcttttttagttcattttacaaatactttcttgttaggtagataataccttctaaggttattatctggatcttctaagtctttttatcgctagcaagtctaagtttctggactttggaattagaagttaatgtcgtaggcgggcatggtggtccacgcctttaatcccagagtttgggaggcagacgcaggtggttttctgagttcgaggccatcctgctcttcaatgttagttccaggacagccagggttatacaaagaaaccctgtctcgagaaacaaaacaaacaaaaaaagagtagctgagtgctctgagttgtctctccagccccttagctatttattttcatttaaattatttttgttttattcgcttgtgtgcctgagtttgaatttcccgggattaacagttgaagactagggctggtgagatggctcagcggttaagattgccgactgctcttccaaaggtcctgag

SEQ ID NO: 774 - DNA, 1088 bp, synthetic construct
  source 1..1088: mol_type = other DNA
acagaatttactaaatagagagtgcagtcatggaattgccattttccccacgtggtttttcgtttgttcctcaccggaggcctccggtttgagcccgaagtctaaaccggtgcgcgtctgcgagctcgcgtgcgcctccgcggccggagcacagtcgcgggcgggcatcagggcggtgcgtggccgtcagtgacgcatgacccttcgcaggcagaagtgggacgggtcaagagaggactgtgatccgattggctgttcggcgaccgtatgctaatcgcggtgacagtctgcgtggtgtagggacacggtagcgactcaaaatgccccgtggacggggtctggagaggtgtcggtctgtcagagaaggtgtccccgcgagggcagacgcggtgtgagatagaggcgcggacagggatgtcacgggtcgtctgtgcgtcagtcgccgtgactaagatgtgggggcggccggtgcagtgcggcgcggtgtggagcgtgaggtttaatgatagggacttagggtgatagaagtgcaaagcatgactgtcaaatttttggagcaggttttctgacttcggtcggaaaacccctaccccctaattctacaagaatagaaagcttagcagctcctctgaatggttgctctcaggtgctagtggttgcaagtcgtatgttgatgcctgcctttgccctacctggtgtgtgagcgtgagcgcgccccacctctccagcctctctcttactgtttttcagacaagatgggactgttgttctcctactgctatgtacctcaatttcaattgatcatgcctggacataactgcccatgttgtaaggtcgtctacgttgtaaggtcgtgctcagtttctgatgcctagactagtcacctttccgtttgcctcctgactgtgtaaatgaggcaaatgaaggtggtctcttaactgacatgttagtgtttgacctatgggatagtttctcattgttgagacagaatttctagaagctggtccgctgagcggctaagagcacttgctgatattgcaaaggatctacctgggtttggttctcagcactcacatggaagttcacat

SEQ ID NO: 775 - DNA, 655 bp, synthetic construct
  source 1..655: mol_type = other DNA
acagaatttactaaatagagagtgcagtcatggaattgccattttccccacgtggtttttcgtttgttcctcaccggaggcctccggtttgagcccgaagtctaaaccggtgcgcgtctgcgagctcgcgtgcgcctccgcggccggagcacagtcgcgggcgggcatcagggcggtgcgtggccgtcagtgacgcatgacccttcgcaggcagaagtgggacgggtcaagagaggactgtgatccgattggctgttcggcgaccgtatgctaatcgcggtgacagtctgcgtggtgtagggacacggtagcgactcaaaatgccccgtggacggggtctggagaggtgtcggtctgtcagagaaggtgtccccgcgagggcagacgcggtgtgagatagaggcgcggacagggatgtcacgggtcgtctgtgcgtcagtcgccgtgactaagatgtgggggcggccggtgcagtgcggcgcggtgtggagcgtgaggtttaatgatagggacttagggtgatagaagtgcaaagcatgactgtcaaatttttggagcaggttttctgacttcggtcggaaaaccccttgtagttcctgcaatttaattttcgtttaaaactttattttattctttaacttaaaaaaaatatata

SEQ ID NO: 776 - DNA, 1087 bp, synthetic construct
  source 1..1087: mol_type = other DNA
ttatctacgttggttttactacagaaactactgttctcagtaaaagcagagagagtacaatgccaacagctttgaaatcctctgtgctcttgtgccaatcccaccctcagaacagggagtctgtcggttatgttttcgtcctttacagttcttcgccgtctaatccattggaaacctcctttatttaaaggaaaccgtgtccaaattcagtgtacagaggtgcaaacctccgccccgctccttgtaggaagcccacgggaactgggccaatcggacggcgcttactcggctcatttacatacccataacacaccgcggctaatgcaaatattttcgtgaaaagatcttccattactcgaagttttaaaactaaaaacaaaatattatttcaaaagatcatgaagaaatttctgtcggtaacagcagtttcaattgataaatcaccatcacttatctaggaggttctgttactctagaagtgaattaagcaggacagctgtaatgatagggacttagggtgatagaagtgcaaagcatgactgtcaaatttttggagcaggttttctgacttcggtcggaaaacccctactttctggagtttcaaaaacagactgtacgccaagggtcatatctttttttgtattggtttgtgtcttggttggtgtcttaggtgttaatcctacagtggagggtttatgggaataggaagtaacatgtcgcctgcatgtcataggagaaaaagcgagcatcagccgtatcggctttgtaacacaaattagctatcgtgaagtccgctcagctcttccctttctaccctggctgctttttgcagggattggtccgtggtctccagtctcttgggttctcaccctgtgtgaaaatcttcgtgtttttccctaccccccagtcacctcttacacagcctctgcttccaagcgcagcccccacaggagtttgtaggatttctgtgctagcggggaatgtgttctcacctcatagagccaggtagaaattatgcagatgggcagttctctgggaagaaagcagggcctttggggctctcagtgtccccgttgggttgtagaca

SEQ ID NO: 777 - DNA, 1087 bp, synthetic construct
  source 1..1087: mol_type = other DNA
ttatctacgttggttttactacagaaactactgttctcagtaaaagcagagagagtacaatgccaacagctttgaaatcctctgtgctcttgtgccaatcccaccctcagaacagggagtctgtcggttatgttttcgtcctttacagttcttcgccgtctaatccattggaaacctcctttatttaaaggaaaccgtgtccaaattcagtgtacagaggtgcaaacctccgccccgctccttgtaggaagcccacgggaactgggccaatcggacggcgcttactcggctcatttacatacccataacacaccgcggctaatgcaaatattttcgtgaaaagatcttccattactcgaagttttaaaactaaaaacaaaatattatttcaaaagatcatgaagaaatttctgtcggtaacagcagtttcaattgataaatcaccatcacttatctaggaggttctgttactctagaagtgaattaagcaggacagctgtaatgatagggacttagggtgatagaagtgcaaagcatgactgtcaaatttttggagcaggttttctgacttcggtcggaaaacccctactttctggagtttctaaaagtagactgtacgctaagggtcatatctttttttgttttggtttgtgtcttggttggcgtcttaaatgttaatcctacagtggagggctggcgaataggaagtaacatgtcgcctgcacgccataggagaaaaagcgagcatcagccgtatcggctttgtaacacaaattagctatcgtgaagtccgctcagctcttccctttctaccctggctgctttttgcagggattggtccgtggtctccagtctcttgggttctcaccctgtgtgaaaatcttcctgtttttccctaccccccaagtcacctcttacacagcctctgcttccaagcgcagcccccacaggagtttgtaggatttctgtgctagcggggagtgtgttctcacctcatagagccaggtagaaactacgcagatgggtgctgttctccaggaagaaagcagggcctttggggctctcagtgtccccgttgggttgtaga

SEQ ID NO: 778 - DNA, 1087 bp, synthetic construct
  source 1..1087: mol_type = other DNA
ttatctacgttggttttactacagaaactactgttctcagtaaaagcagagagagtacaatgccaacagctttgaaatcctctgtgctcttgtgccaatcccaccctcagaacagggagtctgtcggttatgttttcgtcctttacagttcttcgccgtctaatccattggaaacctcctttatttaaaggaaaccgtgtccaaattcagtgtacagaggtgcaaacctccgccccgctccttgtaggaagcccacgggaactgggccaatcggacggcgcttactcggctcatttacatacccataacacaccgcggctaatgcaaatattttcgtgaaaagatcttccattactcgaagttttaaaactaaaaacaaaatattatttcaaaagatcatgaagaaatttctgtcggtaacagcagtttcaattgataaatcaccatcacttatctaggaggttctgttactctagaagtgaattaagcaggacagctgtaatgatagggacttagggtgatagaagtgcaaagcatgactgtcaaatttttggagcaggttttctgacttcggtcggaaaacccctactttctggagtttcaaaaacagaccgtacgccaagggtcatgtcttttttcgtattggtttgtgtcttagttgttaatcctacagtggaggcctggggaataagaagtaacatgtggcctgcacgccataggagaaaaagcgagcatcagccgtatcggctttgtaacacaaattagctatcgtgaagtccgctcagctcttccatttctaccctggctgctttttgcagggattggtccgtggtctccagtctcttgggttctcaccctgtgtgaaaatcttcgtgtttttccctaccccccaagtcacctcttacacagcctctgcttccaagcgcagcccccacaggagtttgtaggatttctgtgctagcggggagtgtgttctcacctcatagagccaggtagaaattatgcagatgggcgctgttctctgggaagaaagcagggcctttggggctctcagtgtccccgttgggttgtagacataacactctta

SEQ ID NO: 779 - DNA, 891 bp, synthetic construct
  source 1..891: mol_type = other DNA
ttatctacgttggttttactacagaaactactgttctcagtaaaagcagagagagtacaatgccaacagctttgaaatcctctgtgctcttgtgccaatcccaccctcagaacagggagtctgtcggttatgttttcgtcctttacagttcttcgccgtctaatccattggaaacctcctttatttaaaggaaaccgtgtccaaattcagtgtacagaggtgcaaacctccgccccgctccttgtaggaagcccacgggaactgggccaatcggacggcgcttactcggctcatttacatacccataacacaccgcggctaatgcaaatattttcgtgaaaagatcttccattactcgaagttttaaaactaaaaacaaaatattatttcaaaagatcatgaagaaatttctgtcggtaacagcagtttcaattgataaatcaccatcacttatctaggaggttctgttactctagaagtgaattaagcaggacagctgtaatgatagggacttagggtgatagaagtgcaaagcatgactgtcaaatttttggagcaggttttctgacttcggtcggaaaacccctcctccggggatacaacgtgtttcctaaaagtagagggaggtaagagacggtagcacctgcggggcggcttgcacgccgagtgcctgtgacgcgccggcttaacttaactgcttccctgaagtaccttgaggttcctgatgtgcgggcggtagacggtaggcttatgcggcacgctgtcgtttccaccgtggctactgcgctttgggaaggccacgacctcctcctttggggaggtccttaggatctcagcttggcagtcgagtgggtggcgaccttttaaaggaatgggacccacccggagttc

SEQ ID NO: 780 - DNA, 1079 bp, synthetic construct
  source 1..1079: mol_type = other DNA
ttatctacgttggttttactacagaaactactgttctcagtaaaagcagagagagtacaatgccaacagctttgaaatcctctgtgctcttgtgccaatcccaccctcagaacagggagtctgtcggttatgttttcgtcctttacagttcttcgccgtctaatccattggaaacctcctttatttaaaggaaaccgtgtccaaattcagtgtacagaggtgcaaacctccgccccgctccttgtaggaagcccacgggaactgggccaatcggacggcgcttactcggctcatttacatacccataacacaccgcggctaatgcaaatattttcgtgaaaagatcttccattactcgaagttttaaaactaaaaacaaaatattatttcaaaagatcatgaagaaatttctgtcggtaacagcagtttcaattgataaatcaccatcacttatctaggaggttctgttactctagaagtgaattaagcaggacagctgtaatgatagggacttagggtgatagaagtgcaaagcatgactgtcaaatttttggagcaggttttctgacttcggtcggaaaacccctttcccttcttgtaatacaaaataataacaaccacagaggacatcgcaagtaaaatgtgtataacaaccccatctaaagaaccctatcatctttctactatctgtctacctaaatatgtatagtataaataaccctatatagcactctaagcaacttaagttaggtaacttagaaaactcttttttttttttgagactgagtctcactctgtcgcacccaggctggagtgcagtggcgtgatctcggctcactgcaacctccaccttctgggttcaagtgattctcccatctcagtctcccaagtagctgggattacaggcacgccaccatgccctgctacatttttttttttttagtagagatgaggtttcaccacattggccaggctgttctcgaactcctgacctcaggtgatccgcccaccttggcctcatgaagtgctgggattacaggtgtgagccactgtacccagccagaaaactcttaaaaaac

SEQ ID NO: 781 - DNA, 969 bp, synthetic construct
  source 1..969: mol_type = other DNA
ttatctacgttggttttactacagaaactactgttctcagtaaaagcagagagagtacaatgccaacagctttgaaatcctctgtgctcttgtgccaatcccaccctcagaacagggagtctgtcggttatgttttcgtcctttacagttcttcgccgtctaatccattggaaacctcctttatttaaaggaaaccgtgtccaaattcagtgtacagaggtgcaaacctccgccccgctccttgtaggaagcccacgggaactgggccaatcggacggcgcttactcggctcatttacatacccataacacaccgcggctaatgcaaatattttcgtgaaaagatcttccattactcgaagttttaaaactaaaaacaaaatattatttcaaaagatcatgaagaaatttctgtcggtaacagcagtttcaattgataaatcaccatcacttatctaggaggttctgttactctagaagtgaattaagcaggacagctgtaatgatagggacttagggtgatagaagtgcaaagcatgactgtcaaatttttggagcaggttttctgacttcggtcggaaaacccctctgaattttcttgcagttgaacaacagaggctttttttgtgtgtgtgggggtgcttggttttgggaggttgaagagtacttgttcgcaaactctctaaatgagagatggggaagtgtcttaccagctgattcgcgagagcacctgcaagtttacctgttttagtgatttgcgtttatgaaagttggagttgctgattttgtgatctctacttttaaggtaaaagcagggcggtgttgacttttcttgccagttggctgtcctgttttctttctcgcactgttttctttttgagacgaagtctgtcgctcaggctggagtgcactggcgtgatctcggctcgctgcaaactttgccgaacccctgtttagcgatttccgtttg

SEQ ID NO: 782 - DNA, 1087 bp, synthetic construct
  source 1..1087: mol_type = other DNA
ttatctacgttggttttactacagaaactactgttctcagtaaaagcagagagagtacaatgccaacagctttgaaatcctctgtgctcttgtgccaatcccaccctcagaacagggagtctgtcggttatgttttcgtcctttacagttcttcgccgtctaatccattggaaacctcctttatttaaaggaaaccgtgtccaaattcagtgtacagaggtgcaaacctccgccccgctccttgtaggaagcccacgggaactgggccaatcggacggcgcttactcggctcatttacatacccataacacaccgcggctaatgcaaatattttcgtgaaaagatcttccattactcgaagttttaaaactaaaaacaaaatattatttcaaaagatcatgaagaaatttctgtcggtaacagcagtttcaattgataaatcaccatcacttatctaggaggttctgttactctagaagtgaattaagcaggacagctgtaatgatagggacttagggtgatagaagtgcaaagcatgactgtcaaatttttggagcaggttttctgacttcggtcggaaaacccctatatgtggtaatccaacaatagaaattatttttaagtttgtgtgttcctttttctgttcaatggtgcttttgatattgttgtaaagcagtgactagcagattctgtgtggtaaaagcactgaaccctgtttagttcttttctccctaccttattggtaattatttctgtgtatatatgttccaaagaaatgcggcttgtatattcatgcttttcaactttttgtgatagacagttgatacacaagtagtacctcctccgggatcttcttagtcaagactgtttggtagatgcatgttttttgttacttgtaatgtacagtattcagttcattttctttttgcagcactgtccggttgaaacacaacgcgaggatcgggcgtggtggctcacgcctgtaatcccagcactttgggaggccgaggcaggacaatcaagaccaatcctggtcatcaaggcaggagaatcaagaccatcgaggtcaggagatcaagaccatcct

SEQ ID NO: 783 - DNA, 1085 bp, synthetic construct
  source 1..1085: mol_type = other DNA
ttatctacgttggttttactacagaaactactgttctcagtaaaagcagagagagtacaatgccaacagctttgaaatcctctgtgctcttgtgccaatcccaccctcagaacagggagtctgtcggttatgttttcgtcctttacagttcttcgccgtctaatccattggaaacctcctttatttaaaggaaaccgtgtccaaattcagtgtacagaggtgcaaacctccgccccgctccttgtaggaagcccacgggaactgggccaatcggacggcgcttactcggctcatttacatacccataacacaccgcggctaatgcaaatattttcgtgaaaagatcttccattactcgaagttttaaaactaaaaacaaaatattatttcaaaagatcatgaagaaatttctgtcggtaacagcagtttcaattgataaatcaccatcacttatctaggaggttctgttactctagaagtgaattaagcaggacagctgtaatgatagggacttagggtgatagaagtgcaaagcatgactgtcaaatttttggagcaggttttctgacttcggtcggaaaacccctacatcaggttgtttttctgtttttacatcaggttgtttttctgtttggttttttttttacaccacgtttatacgccggtgcacggtttaccactgaaaacacctttcatctacaggtgatatcttttaacacaaataaaatgtagtagtcctaggagacggaatagaaggaggtggggcctaggcagattcatctctgcggtgcattttgcctctggccctcgggccctagtttgcgatctttcccatcttgcctctgcttccctctgcacaatcctgagtattgcagtaccttacacttaaggaaatttcgtcttgccaaagttgatccatttcagctccgaaacataacaggaactagtgcaacgataaacgtatgaggaacttgcaataagagtgacagaatcctttgaatcaaaaaaaaaaaaagccaccacttaatgagtatctaccatatgtcaagggcttcaccaatatttcattgaaatattccagacca

SEQ ID NO: 784 - DNA, 1087 bp, synthetic construct
  source 1..1087: mol_type = other DNA
ttatctacgttggttttactacagaaactactgttctcagtaaaagcagagagagtacaatgccaacagctttgaaatcctctgtgctcttgtgccaatcccaccctcagaacagggagtctgtcggttatgttttcgtcctttacagttcttcgccgtctaatccattggaaacctcctttatttaaaggaaaccgtgtccaaattcagtgtacagaggtgcaaacctccgccccgctccttgtaggaagcccacgggaactgggccaatcggacggcgcttactcggctcatttacatacccataacacaccgcggctaatgcaaatattttcgtgaaaagatcttccattactcgaagttttaaaactaaaaacaaaatattatttcaaaagatcatgaagaaatttctgtcggtaacagcagtttcaattgataaatcaccatcacttatctaggaggttctgttactctagaagtgaattaagcaggacagctgtaatgatagggacttagggtgatagaagtgcaaagcatgactgtcaaatttttggagcaggttttctgacttcggtcggaaaacccctcttatgatgtttgttgccaatgatagattgttttcactgtgcaaaaattatgggtagttttggtggtcttgatgcagttgtaagcttggggtatgaaggtttgggccacgcctgggcgcttccggctgcgccggatgctgtttcctttccgctcccaggggcgttgggaacggttgtaggacgtggctctttattcgtgagttttccatttacctccgctgaacctagagcttcagacgccctatggcgtccgcctcgacccaaccggcggccttgagcgctgagcaagcaaagggtgagaatcgtcctagtcaaggcataggctgctggcctggggtagtcaaggcatgggctgctggtctggggaggatgcgggcggaggatgtggggcgacaaacctggctacgtccgccgggaaaatggggtaggggacgccgggtaccgtccttctaagtggggcgcttgcccccaagacttgggatcttattgggttacctaca

SEQ ID NO: 785 - DNA, 1085 bp, synthetic construct
  source 1..1085: mol_type = other DNA
ttatctacgttggttttactacagaaactactgttctcagtaaaagcagagagagtacaatgccaacagctttgaaatcctctgtgctcttgtgccaatcccaccctcagaacagggagtctgtcggttatgttttcgtcctttacagttcttcgccgtctaatccattggaaacctcctttatttaaaggaaaccgtgtccaaattcagtgtacagaggtgcaaacctccgccccgctccttgtaggaagcccacgggaactgggccaatcggacggcgcttactcggctcatttacatacccataacacaccgcggctaatgcaaatattttcgtgaaaagatcttccattactcgaagttttaaaactaaaaacaaaatattatttcaaaagatcatgaagaaatttctgtcggtaacagcagtttcaattgataaatcaccatcacttatctaggaggttctgttactctagaagtgaattaagcaggacagctgtaatgatagggacttagggtgatagaagtgcaaagcatgactgtcaaatttttggagcaggttttctgacttcggtcggaaaaccccttctttactgttatatgttaggcgaaatattacgcgtttggagtaagtggtgctttttgtaactgaaaagagattctgtgtgtgtttttttttttttagaggctgcatagttatttgtatgaaccgcaggtgacctaattagcaaggtaattcagacctgtatcctagcacttaagaagtggaagtgggataaccctgcgtgttctcgtgtgggaggctagcttaagcaacaaagcaggaaggccccaccaacaaaagaatttaaaaattatacgtgcgtggtggcgcgcgtatgaggaaattatttggcaactgtgttacagtatagcagcaaatggaatagacctagtccctgactttaggagacctgcctcagccccccgaatggctgggactacaggcgtgcgcctccgcgcccagctaatttttgcatttttggtagagacgggttcaccatgttggccaggatggtctccatctcttcatctggtgatccgcc

SEQ ID NO: 786 - DNA, 1087 bp, synthetic construct
  source 1..1087: mol_type = other DNA
ttatctacgttggttttactacagaaactactgttctcagtaaaagcagagagagtacaatgccaacagctttgaaatcctctgtgctcttgtgccaatcccaccctcagaacagggagtctgtcggttatgttttcgtcctttacagttcttcgccgtctaatccattggaaacctcctttatttaaaggaaaccgtgtccaaattcagtgtacagaggtgcaaacctccgccccgctccttgtaggaagcccacgggaactgggccaatcggacggcgcttactcggctcatttacatacccataacacaccgcggctaatgcaaatattttcgtgaaaagatcttccattactcgaagttttaaaactaaaaacaaaatattatttcaaaagatcatgaagaaatttctgtcggtaacagcagtttcaattgataaatcaccatcacttatctaggaggttctgttactctagaagtgaattaagcaggacagctgtaatgatagggacttagggtgatagaagtgcaaagcatgactgtcaaatttttggagcaggttttctgacttcggtcggaaaacccctaccttattcacgcctaaaaagtagactgactgtggggtggtcgtgttttttgtttcttgttggtaggtggtgaatgcgtttttttcgttgttttctccgttactcaggctgccagttgcttggcagtcttgtcgctggctgtggacgctctgcacttcatcaccgtccccagctgcgctttgagccggtctaaggttgcccacagtattgacgttgggacccacgaaactggcaatttccatgtgtgcggccttacccagttctcccaaacttctgcgtataaccgcttctctgtgcttcagaaagataagtccggccccggcctcacacagcagctcagttcgtgacagcgtttaatatgtaaaatggagcaaataatttatagggcgttgggagagttaaagagactaattcatttacgtgttaaatacagggaatggcttttgcattgatataaccccagcctccagcatgcgccagacctgacgtaggtgttcggc

SEQ ID NO: 787 - DNA, 1087 bp, synthetic construct
  source 1..1087: mol_type = other DNA
ttatctacgttggttttactacagaaactactgttctcagtaaaagcagagagagtacaatgccaacagctttgaaatcctctgtgctcttgtgccaatcccaccctcagaacagggagtctgtcggttatgttttcgtcctttacagttcttcgccgtctaatccattggaaacctcctttatttaaaggaaaccgtgtccaaattcagtgtacagaggtgcaaacctccgccccgctccttgtaggaagcccacgggaactgggccaatcggacggcgcttactcggctcatttacatacccataacacaccgcggctaatgcaaatattttcgtgaaaagatcttccattactcgaagttttaaaactaaaaacaaaatattatttcaaaagatcatgaagaaatttctgtcggtaacagcagtttcaattgataaatcaccatcacttatctaggaggttctgttactctagaagtgaattaagcaggacagctgtaatgatagggacttagggtgatagaagtgcaaagcatgactgtcaaatttttggagcaggttttctgacttcggtcggaaaaccccttttgacccattacccatctaagttagatgcttttttaaatgttttttaatttttaaatttttaatttttttcattatttattttttatttttgagacggatctcggctcactgtaacctccacctcccgggttcaagcgattctcctgactcagcctcccgagtagctgggattacaggcgcgcgccaccatgcccggctaatttttctatttttagtaaagacggggtttcgccatgttgaccagggtggtcttgaactcctgacgtcaggtgatcctcctgcctcgtgctgggattgcaggcgtgagccaccgctcccggcccttagatgctttttaatcagcaagtacgcaatgctttcctgacaggaatgtcaagtccgtcaggaaatccacataagggtgttaagcaggcaaagtaccacatacagattaaaatcaaaagcactgtcaacgcttatttaatttatacagtagaccctaacttttctaattttgtg

SEQ ID NO: 788 - DNA, 1087 bp, synthetic construct
  source 1..1087: mol_type = other DNA
ttatctacgttggttttactacagaaactactgttctcagtaaaagcagagagagtacaatgccaacagctttgaaatcctctgtgctcttgtgccaatcccaccctcagaacagggagtctgtcggttatgttttcgtcctttacagttcttcgccgtctaatccattggaaacctcctttatttaaaggaaaccgtgtccaaattcagtgtacagaggtgcaaacctccgccccgctccttgtaggaagcccacgggaactgggccaatcggacggcgcttactcggctcatttacatacccataacacaccgcggctaatgcaaatattttcgtgaaaagatcttccattactcgaagttttaaaactaaaaacaaaatattatttcaaaagatcatgaagaaatttctgtcggtaacagcagtttcaattgataaatcaccatcacttatctaggaggttctgttactctagaagtgaattaagcaggacagctgtaatgatagggacttagggtgatagaagtgcaaagcatgactgtcaaatttttggagcaggttttctgacttcggtcggaaaacccctgtttacttggttttaaaaatagcttgcactagcgataccgcgaatatggttattaggtttgttaggcacagtcgtgtcttactatagaaaaataacgtagtgttcattttgctgcctgtatgtgttaatttgtccttattgcgccattgttcttgttaagtcttctgtaaggagttgcgggtttcaaactgtcagtctgagagcataagctcacttttcagtcagttgaattgaatgttacattcgattggttctggatattgatattacccaaggcttgtcctgtttgtaagtcttttcctacacctgacaatatgattatgtttacaatgtccctagaactctgggtgtatcgttcccactgaataaaatttgatctctaagttgacctataaatttaagtaccaaaaaactggtttgtaagattttggaaggcagaggcagggaagagaccaacgtggtctacatataaagtaccaggtacatataaagtaccaggt

SEQ ID NO: 789 - DNA, 1083 bp, synthetic construct
  source 1..1083: mol_type = other DNA
ttatctacgttggttttactacagaaactactgttctcagtaaaagcagagagagtacaatgccaacagctttgaaatcctctgtgctcttgtgccaatcccaccctcagaacagggagtctgtcggttatgttttcgtcctttacagttcttcgccgtctaatccattggaaacctcctttatttaaaggaaaccgtgtccaaattcagtgtacagaggtgcaaacctccgccccgctccttgtaggaagcccacgggaactgggccaatcggacggcgcttactcggctcatttacatacccataacacaccgcggctaatgcaaatattttcgtgaaaagatcttccattactcgaagttttaaaactaaaaacaaaatattatttcaaaagatcatgaagaaatttctgtcggtaacagcagtttcaattgataaatcaccatcacttatctaggaggttctgttactctagaagtgaattaagcaggacagctgtaatgatagggacttagggtgatagaagtgcaaagcatgactgtcaaatttttggagcaggttttctgacttcggtcggaaaacccctatttttgtggtgctaaaagttagattgcattccgcccttctcacgtctctttacgtgttgtttgcgaggcgtggcctcggaggtaaatggtctccttttacctcagataagcttacctttgctctgtgagtaagaatgtagctacacttccaaatttagctattgtcctttgcggtccaaatgaaaatattaccttccgatctaacaatgttaaactagtcccaggcccttctatcgattgccagaatagactagactactacacagacacaccctctcaaatcaggccagctcctgcaacctgcacctacagtttgtcccctgggacaaatgaaaggacaggccctctttcccccccccccccaaatcagagcacacacagatcttggggtctggggcagaaatttcgttcatggaaaaaacaaacaaacaaacaaacacgatcaaaggaagctcgttccctttggcctcagggtttcttagacgccgtgttccc

SEQ ID NO: 790 - DNA, 1084 bp, synthetic construct
  source 1..1084: mol_type = other DNA
ttatctacgttggttttactacagaaactactgttctcagtaaaagcagagagagtacaatgccaacagctttgaaatcctctgtgctcttgtgccaatcccaccctcagaacagggagtctgtcggttatgttttcgtcctttacagttcttcgccgtctaatccattggaaacctcctttatttaaaggaaaccgtgtccaaattcagtgtacagaggtgcaaacctccgccccgctccttgtaggaagcccacgggaactgggccaatcggacggcgcttactcggctcatttacatacccataacacaccgcggctaatgcaaatattttcgtgaaaagatcttccattactcgaagttttaaaactaaaaacaaaatattatttcaaaagatcatgaagaaatttctgtcggtaacagcagtttcaattgataaatcaccatcacttatctaggaggttctgttactctagaagtgaattaagcaggacagctgtaatgatagggacttagggtgatagaagtgcaaagcatgactgtcaaatttttggagcaggttttctgacttcggtcggaaaacccctataactggtaaccaaaagcagattactttcccccttgtggtcttcgcgtttgcggacgggagagaactttcggccattttccttttagaaatttaacttcttgaaggccaccaggtgacccttacttccctctcacctttccttctacctgtactttctctattaaaaagcctgcagaagtacccttgacaaattgccaaaaatgacacctaaaaaaaaaaaaaggaaaaacgacaccttaggtaattataggttgtaagaaaaagatttgacctcttggagtttttatttcttaataccaaaggacacccaaggaacgtatctctcaaaattgggtttcaaacctcagccgtttccttcttagttccagtgcttaacacgcaacagacctgcacaccactacactgcatacgagttttaaagttaataaatcagtcacccctccatagtcttctacctacttgaagacagaaacggctgctaggaagcaattcttc

SEQ ID NO: 791 - DNA, 1087 bp, synthetic construct
  source 1..1087: mol_type = other DNA
ttatctacgttggttttactacagaaactactgttctcagtaaaagcagagagagtacaatgccaacagctttgaaatcctctgtgctcttgtgccaatcccaccctcagaacagggagtctgtcggttatgttttcgtcctttacagttcttcgccgtctaatccattggaaacctcctttatttaaaggaaaccgtgtccaaattcagtgtacagaggtgcaaacctccgccccgctccttgtaggaagcccacgggaactgggccaatcggacggcgcttactcggctcatttacatacccataacacaccgcggctaatgcaaatattttcgtgaaaagatcttccattactcgaagttttaaaactaaaaacaaaatattatttcaaaagatcatgaagaaatttctgtcggtaacagcagtttcaattgataaatcaccatcacttatctaggaggttctgttactctagaagtgaattaagcaggacagctgtaatgatagggacttagggtgatagaagtgcaaagcatgactgtcaaatttttggagcaggttttctgacttcggtcggaaaacccctctggggaataagagtggtttaaagaaagaacaatttgagagatctgcttagatctaataaaacccaagtatagtttctttagacgtcttatatctcacgtaggacctcttatttcagactcactgcaagaacaagctaaagaactatatacagtcaggaacaaggtgagccatcgcggttctcagtcccatgatcttaagagtttttcctcttcccctcttccctggctgtcctggagctcactctgtagaccaggctggtctcaaactcagaaatccacttacctctgcctcccaagggctgggattaaaggcatgcaccaccattgcccggcagggtatgtggactatgctgtccttcaactcagagatcgtggtactttaaatctcattttccgaaagaaaagaaaagaaaggaaggggggaaataaagccagtatattttgcacccacaatctgaagttctacaaatattgttagaaaatgcaaaggacccaagtc

SEQ ID NO: 792 - DNA, 1087 bp, synthetic construct
  source 1..1087: mol_type = other DNA
ttatctacgttggttttactacagaaactactgttctcagtaaaagcagagagagtacaatgccaacagctttgaaatcctctgtgctcttgtgccaatcccaccctcagaacagggagtctgtcggttatgttttcgtcctttacagttcttcgccgtctaatccattggaaacctcctttatttaaaggaaaccgtgtccaaattcagtgtacagaggtgcaaacctccgccccgctccttgtaggaagcccacgggaactgggccaatcggacggcgcttactcggctcatttacatacccataacacaccgcggctaatgcaaatattttcgtgaaaagatcttccattactcgaagttttaaaactaaaaacaaaatattatttcaaaagatcatgaagaaatttctgtcggtaacagcagtttcaattgataaatcaccatcacttatctaggaggttctgttactctagaagtgaattaagcaggacagctgtaatgatagggacttagggtgatagaagtgcaaagcatgactgtcaaatttttggagcaggttttctgacttcggtcggaaaacccctctcggtttatcttaaagggttttaaatatagaaagcttccttagtcttatgggtgagagtgctgtttaagccttacctaggtatgtctttgaacatttattacagattgttatttgtgactatgaccactcaggtgttctgttcttgtgaatttagacacactcagaaaggctacacactcaaagaccacaccaaagtgaagtactatctgggccgtgaaactggtcacatatcagttattttgcagtaaaacaaggaagtcaatcatactgcttcagtgggtcagggagtcaagaatgcacagtacaagagctggtgagattcctcagcaggtaagagcactgaatgctcttccaaagattctgagttcaaatcccagcaaccacgtggtggatttgaacaaaggatgaaaacaaccatccataaccagatctgatgccctcttctggagtgtcaaaagacagctatggtgtacttacataaataaataagtaaaaaca

SEQ ID NO: 793 - DNA, 1087 bp, synthetic construct
  source 1..1087: mol_type = other DNA
ttatctacgttggttttactacagaaactactgttctcagtaaaagcagagagagtacaatgccaacagctttgaaatcctctgtgctcttgtgccaatcccaccctcagaacagggagtctgtcggttatgttttcgtcctttacagttcttcgccgtctaatccattggaaacctcctttatttaaaggaaaccgtgtccaaattcagtgtacagaggtgcaaacctccgccccgctccttgtaggaagcccacgggaactgggccaatcggacggcgcttactcggctcatttacatacccataacacaccgcggctaatgcaaatattttcgtgaaaagatcttccattactcgaagttttaaaactaaaaacaaaatattatttcaaaagatcatgaagaaatttctgtcggtaacagcagtttcaattgataaatcaccatcacttatctaggaggttctgttactctagaagtgaattaagcaggacagctgtaatgatagggacttagggtgatagaagtgcaaagcatgactgtcaaatttttggagcaggttttctgacttcggtcggaaaacccctccacattttgtgtttaaaaatagaaatatttaagtgagatcagtttaaatctgctttatctagggtgtctaactgcttgcatctttttaacttttccttatttgtgagaaggtctgtaaaacttattatatgttagtacactgtagctgtcttcagacactccagaagagggattcagatcaccttacagatggttttgagccaccatgtggttgctgggatttgaactcaggacctttagaaaagtagttgggtgctcttacccgctgagccatctcaccagccctttttttttcttttttccagttcgggtttctctgtgtgtagccctggctgtcctggaactcattctgtagaccgggctggcctcgaactcagaaatctgcctgcctctgcctcccaagtgctgggattaaaggaatgtgccttcattgcccggctctagggctttttgttgttgtttgtttgtttgtttgtttgtttgcttttgtggatggcct

SEQ ID NO: 794 - DNA, 1087 bp, synthetic construct
  source 1..1087: mol_type = other DNA
ttatctacgttggttttactacagaaactactgttctcagtaaaagcagagagagtacaatgccaacagctttgaaatcctctgtgctcttgtgccaatcccaccctcagaacagggagtctgtcggttatgttttcgtcctttacagttcttcgccgtctaatccattggaaacctcctttatttaaaggaaaccgtgtccaaattcagtgtacagaggtgcaaacctccgccccgctccttgtaggaagcccacgggaactgggccaatcggacggcgcttactcggctcatttacatacccataacacaccgcggctaatgcaaatattttcgtgaaaagatcttccattactcgaagttttaaaactaaaaacaaaatattatttcaaaagatcatgaagaaatttctgtcggtaacagcagtttcaattgataaatcaccatcacttatctaggaggttctgttactctagaagtgaattaagcaggacagctgtaatgatagggacttagggtgatagaagtgcaaagcatgactgtcaaatttttggagcaggttttctgacttcggtcggaaaacccctaaaaccagtaagggagaaaggtcaagtaacatataaaggaaggcctatcagaattacaccagacttttcaccagagactatgaaagccagaagagcctggacagatgttatacagacactaagagaacacaaatgccagcccaggctactatacctggccaaactctcaattaccatagatggagaaaccaaagtattccacgacaaaaacaaattcacacaatatctttccacgaatccagcccttcaaaggataatgacagaaaagaagcaatacaaggacggaaatcacgccctagaacaaccaagaaactaatcattcaacaaaccaaaaagaagacagccacaagaacagaatgccaactctaacaacaaaaataaaaggaagcaacaattacttttccttaatatctcttaatatcaatggactcaattccccaataaaaagacatagactaacagactggctacacaaacaggacccaacattctgctgctta

SEQ ID NO: 795 - DNA, 1087 bp, synthetic construct
  source 1..1087: mol_type = other DNA
ttatctacgttggttttactacagaaactactgttctcagtaaaagcagagagagtacaatgccaacagctttgaaatcctctgtgctcttgtgccaatcccaccctcagaacagggagtctgtcggttatgttttcgtcctttacagttcttcgccgtctaatccattggaaacctcctttatttaaaggaaaccgtgtccaaattcagtgtacagaggtgcaaacctccgccccgctccttgtaggaagcccacgggaactgggccaatcggacggcgcttactcggctcatttacatacccataacacaccgcggctaatgcaaatattttcgtgaaaagatcttccattactcgaagttttaaaactaaaaacaaaatattatttcaaaagatcatgaagaaatttctgtcggtaacagcagtttcaattgataaatcaccatcacttatctaggaggttctgttactctagaagtgaattaagcaggacagctgtaatgatagggacttagggtgatagaagtgcaaagcatgactgtcaaatttttggagcaggttttctgacttcggtcggaaaacccctcccaatttcactggtctacaatgaaagcaaaacagttctcttccccgctccccggtgtgtgagaggggctttgatccttctctggtttcctaggaaacgcgtatgtgctagagccacgctctgagacttccgcctcgtgcggtcccgcttcctttctgcctcctctggcctgcatccgtgggggaggtggctggctgcagggttctccggatctcttctgtgttcccactactcaagcaccgagtggcgttctatggcgtccgcctcggctcagcccgcggccctgagcgcggagcaggccaagggtgaggaaagagcctagtctgggtgtgggccgtcttctggggggagggcgcgatactattctttgcctctccaagtggggcccttgcccattagggcgaagggttgggaggacaagcttatcgggttgcttgcaggcctcggcccactaattccctgcctcttccctcctctgggctcgcccgccgtcctccgcg

SEQ ID NO: 796 - DNA, 1087 bp, synthetic construct
  source 1..1087: mol_type = other DNA
ttatctacgttggttttactacagaaactactgttctcagtaaaagcagagagagtacaatgccaacagctttgaaatcctctgtgctcttgtgccaatcccaccctcagaacagggagtctgtcggttatgttttcgtcctttacagttcttcgccgtctaatccattggaaacctcctttatttaaaggaaaccgtgtccaaattcagtgtacagaggtgcaaacctccgccccgctccttgtaggaagcccacgggaactgggccaatcggacggcgcttactcggctcatttacatacccataacacaccgcggctaatgcaaatattttcgtgaaaagatcttccattactcgaagttttaaaactaaaaacaaaatattatttcaaaagatcatgaagaaatttctgtcggtaacagcagtttcaattgataaatcaccatcacttatctaggaggttctgttactctagaagtgaattaagcaggacagctgtaatgatagggacttagggtgatagaagtgcaaagcatgactgtcaaatttttggagcaggttttctgacttcggtcggaaaacccctgaatttgttaaattacaggaggaagcttttttagttcattttacaaatactttcttgttaggtagataataccttctaaggttattatctggatcttctaagtctttttatcgctagcaagtctaagtttctggactttggaattagaagttaatgtcgtaggcgggcatggtggtccacgcctttaatcccagagtttgggaggcagacgcaggtggttttctgagttcgaggccatcctgctcttcaatgttagttccaggacagccagggttatacaaagaaaccctgtctcgagaaacaaaacaaacaaaaaaagagtagctgagtgctctgagttgtctctccagccccttagctatttattttcatttaaattatttttgttttattcgcttgtgtgcctgagtttgaatttcccgggattaacagttgaagactagggctggtgagatggctcagcggttaagattgccgactgctcttccaaaggtcctgag

SEQ ID NO: 797 - DNA, 1087 bp, synthetic construct
  source 1..1087: mol_type = other DNA
ttatctacgttggttttactacagaaactactgttctcagtaaaagcagagagagtacaatgccaacagctttgaaatcctctgtgctcttgtgccaatcccaccctcagaacagggagtctgtcggttatgttttcgtcctttacagttcttcgccgtctaatccattggaaacctcctttatttaaaggaaaccgtgtccaaattcagtgtacagaggtgcaaacctccgccccgctccttgtaggaagcccacgggaactgggccaatcggacggcgcttactcggctcatttacatacccataacacaccgcggctaatgcaaatattttcgtgaaaagatcttccattactcgaagttttaaaactaaaaacaaaatattatttcaaaagatcatgaagaaatttctgtcggtaacagcagtttcaattgataaatcaccatcacttatctaggaggttctgttactctagaagtgaattaagcaggacagctgtaatgatagggacttagggtgatagaagtgcaaagcatgactgtcaaatttttggagcaggttttctgacttcggtcggaaaacccctaccccctaattctacaagaatagaaagcttagcagctcctctgaatggttgctctcaggtgctagtggttgcaagtcgtatgttgatgcctgcctttgccctacctggtgtgtgagcgtgagcgcgccccacctctccagcctctctcttactgtttttcagacaagatgggactgttgttctcctactgctatgtacctcaatttcaattgatcatgcctggacataactgcccatgttgtaaggtcgtctacgttgtaaggtcgtgctcagtttctgatgcctagactagtcacctttccgtttgcctcctgactgtgtaaatgaggcaaatgaaggtggtctcttaactgacatgttagtgtttgacctatgggatagtttctcattgttgagacagaatttctagaagctggtccgctgagcggctaagagcacttgctgatattgcaaaggatctacctgggtttggttctcagcactcacatggaagttcacat

SEQ ID NO: 798 - DNA, 654 bp, synthetic construct
  source 1..654: mol_type = other DNA
ttatctacgttggttttactacagaaactactgttctcagtaaaagcagagagagtacaatgccaacagctttgaaatcctctgtgctcttgtgccaatcccaccctcagaacagggagtctgtcggttatgttttcgtcctttacagttcttcgccgtctaatccattggaaacctcctttatttaaaggaaaccgtgtccaaattcagtgtacagaggtgcaaacctccgccccgctccttgtaggaagcccacgggaactgggccaatcggacggcgcttactcggctcatttacatacccataacacaccgcggctaatgcaaatattttcgtgaaaagatcttccattactcgaagttttaaaactaaaaacaaaatattatttcaaaagatcatgaagaaatttctgtcggtaacagcagtttcaattgataaatcaccatcacttatctaggaggttctgttactctagaagtgaattaagcaggacagctgtaatgatagggacttagggtgatagaagtgcaaagcatgactgtcaaatttttggagcaggttttctgacttcggtcggaaaaccccttgtagttcctgcaatttaattttcgtttaaaactttattttattctttaacttaaaaaaaatatata

SEQ ID NO: 799 - DNA, 1087 bp, synthetic construct
  source 1..1087: mol_type = other DNA
ggcatgtgattttgttttgtttaggtttttttttaactttatttgatcaacatgaaataatacaataagctatgtcttctaaccagcaggcagccagccaggagccatgtgtagcagtgttagaagctgcagcaggcatgtgggtaattgtggggagcttttaggaacagctagggagctgtgtggagctgcagagatgcagaggagcctggaggaacagaccagtgctgtgggctgggaggagcccccctcacaggtacttgctcaacggctccacgaccataagccttgaataagttacatggacattttacaaatggcacaggattgattatgtctgctgccagaagcctcatgtcgataaggagagagctggccaaaaggtaaagtatgctagctccatacagtgcaatagccacgtagtctcacagagaaagaggcaggcctgcatcatatccaaatatggccaagaattttattaaattaaaatgcaaacagcaaatgatagggacttagggtgatagaagtgcaaagcatgactgtcaaatttttggagcaggttttctgacttcggtcggaaaacccctactttctggagtttcaaaaacagactgtacgccaagggtcatatctttttttgtattggtttgtgtcttggttggtgtcttaggtgttaatcctacagtggagggtttatgggaataggaagtaacatgtcgcctgcatgtcataggagaaaaagcgagcatcagccgtatcggctttgtaacacaaattagctatcgtgaagtccgctcagctcttccctttctaccctggctgctttttgcagggattggtccgtggtctccagtctcttgggttctcaccctgtgtgaaaatcttcgtgtttttccctaccccccagtcacctcttacacagcctctgcttccaagcgcagcccccacaggagtttgtaggatttctgtgctagcggggaatgtgttctcacctcatagagccaggtagaaattatgcagatgggcagttctctgggaagaaagcagggcctttggggctctcagtgtccccgttgggttgtagaca

SEQ ID NO: 800 - DNA, 1087 bp, synthetic construct
  source 1..1087: mol_type = other DNA
ggcatgtgattttgttttgtttaggtttttttttaactttatttgatcaacatgaaataatacaataagctatgtcttctaaccagcaggcagccagccaggagccatgtgtagcagtgttagaagctgcagcaggcatgtgggtaattgtggggagcttttaggaacagctagggagctgtgtggagctgcagagatgcagaggagcctggaggaacagaccagtgctgtgggctgggaggagcccccctcacaggtacttgctcaacggctccacgaccataagccttgaataagttacatggacattttacaaatggcacaggattgattatgtctgctgccagaagcctcatgtcgataaggagagagctggccaaaaggtaaagtatgctagctccatacagtgcaatagccacgtagtctcacagagaaagaggcaggcctgcatcatatccaaatatggccaagaattttattaaattaaaatgcaaacagcaaatgatagggacttagggtgatagaagtgcaaagcatgactgtcaaatttttggagcaggttttctgacttcggtcggaaaacccctactttctggagtttctaaaagtagactgtacgctaagggtcatatctttttttgttttggtttgtgtcttggttggcgtcttaaatgttaatcctacagtggagggctggcgaataggaagtaacatgtcgcctgcacgccataggagaaaaagcgagcatcagccgtatcggctttgtaacacaaattagctatcgtgaagtccgctcagctcttccctttctaccctggctgctttttgcagggattggtccgtggtctccagtctcttgggttctcaccctgtgtgaaaatcttcctgtttttccctaccccccaagtcacctcttacacagcctctgcttccaagcgcagcccccacaggagtttgtaggatttctgtgctagcggggagtgtgttctcacctcatagagccaggtagaaactacgcagatgggtgctgttctccaggaagaaagcagggcctttggggctctcagtgtccccgttgggttgtaga

SEQ ID NO: 801 - DNA, 1087 bp, synthetic construct
  source 1..1087: mol_type = other DNA
ggcatgtgattttgttttgtttaggtttttttttaactttatttgatcaacatgaaataatacaataagctatgtcttctaaccagcaggcagccagccaggagccatgtgtagcagtgttagaagctgcagcaggcatgtgggtaattgtggggagcttttaggaacagctagggagctgtgtggagctgcagagatgcagaggagcctggaggaacagaccagtgctgtgggctgggaggagcccccctcacaggtacttgctcaacggctccacgaccataagccttgaataagttacatggacattttacaaatggcacaggattgattatgtctgctgccagaagcctcatgtcgataaggagagagctggccaaaaggtaaagtatgctagctccatacagtgcaatagccacgtagtctcacagagaaagaggcaggcctgcatcatatccaaatatggccaagaattttattaaattaaaatgcaaacagcaaatgatagggacttagggtgatagaagtgcaaagcatgactgtcaaatttttggagcaggttttctgacttcggtcggaaaacccctactttctggagtttcaaaaacagaccgtacgccaagggtcatgtcttttttcgtattggtttgtgtcttagttgttaatcctacagtggaggcctggggaataagaagtaacatgtggcctgcacgccataggagaaaaagcgagcatcagccgtatcggctttgtaacacaaattagctatcgtgaagtccgctcagctcttccatttctaccctggctgctttttgcagggattggtccgtggtctccagtctcttgggttctcaccctgtgtgaaaatcttcgtgtttttccctaccccccaagtcacctcttacacagcctctgcttccaagcgcagcccccacaggagtttgtaggatttctgtgctagcggggagtgtgttctcacctcatagagccaggtagaaattatgcagatgggcgctgttctctgggaagaaagcagggcctttggggctctcagtgtccccgttgggttgtagacataacactctta

SEQ ID NO: 802 - DNA, 891 bp, synthetic construct
  source 1..891: mol_type = other DNA
ggcatgtgattttgttttgtttaggtttttttttaactttatttgatcaacatgaaataatacaataagctatgtcttctaaccagcaggcagccagccaggagccatgtgtagcagtgttagaagctgcagcaggcatgtgggtaattgtggggagcttttaggaacagctagggagctgtgtggagctgcagagatgcagaggagcctggaggaacagaccagtgctgtgggctgggaggagcccccctcacaggtacttgctcaacggctccacgaccataagccttgaataagttacatggacattttacaaatggcacaggattgattatgtctgctgccagaagcctcatgtcgataaggagagagctggccaaaaggtaaagtatgctagctccatacagtgcaatagccacgtagtctcacagagaaagaggcaggcctgcatcatatccaaatatggccaagaattttattaaattaaaatgcaaacagcaaatgatagggacttagggtgatagaagtgcaaagcatgactgtcaaatttttggagcaggttttctgacttcggtcggaaaacccctcctccggggatacaacgtgtttcctaaaagtagagggaggtaagagacggtagcacctgcggggcggcttgcacgccgagtgcctgtgacgcgccggcttaacttaactgcttccctgaagtaccttgaggttcctgatgtgcgggcggtagacggtaggcttatgcggcacgctgtcgtttccaccgtggctactgcgctttgggaaggccacgacctcctcctttggggaggtccttaggatctcagcttggcagtcgagtgggtggcgaccttttaaaggaatgggacccacccggagttc

SEQ ID NO: 803 - DNA, 1079 bp, synthetic construct
  source 1..1079: mol_type = other DNA
ggcatgtgattttgttttgtttaggtttttttttaactttatttgatcaacatgaaataatacaataagctatgtcttctaaccagcaggcagccagccaggagccatgtgtagcagtgttagaagctgcagcaggcatgtgggtaattgtggggagcttttaggaacagctagggagctgtgtggagctgcagagatgcagaggagcctggaggaacagaccagtgctgtgggctgggaggagcccccctcacaggtacttgctcaacggctccacgaccataagccttgaataagttacatggacattttacaaatggcacaggattgattatgtctgctgccagaagcctcatgtcgataaggagagagctggccaaaaggtaaagtatgctagctccatacagtgcaatagccacgtagtctcacagagaaagaggcaggcctgcatcatatccaaatatggccaagaattttattaaattaaaatgcaaacagcaaatgatagggacttagggtgatagaagtgcaaagcatgactgtcaaatttttggagcaggttttctgacttcggtcggaaaacccctttcccttcttgtaatacaaaataataacaaccacagaggacatcgcaagtaaaatgtgtataacaaccccatctaaagaaccctatcatctttctactatctgtctacctaaatatgtatagtataaataaccctatatagcactctaagcaacttaagttaggtaacttagaaaactcttttttttttttgagactgagtctcactctgtcgcacccaggctggagtgcagtggcgtgatctcggctcactgcaacctccaccttctgggttcaagtgattctcccatctcagtctcccaagtagctgggattacaggcacgccaccatgccctgctacatttttttttttttagtagagatgaggtttcaccacattggccaggctgttctcgaactcctgacctcaggtgatccgcccaccttggcctcatgaagtgctgggattacaggtgtgagccactgtacccagccagaaaactcttaaaaaac

SEQ ID NO: 804 - DNA, 969 bp, synthetic construct
  source 1..969: mol_type = other DNA
ggcatgtgattttgttttgtttaggtttttttttaactttatttgatcaacatgaaataatacaataagctatgtcttctaaccagcaggcagccagccaggagccatgtgtagcagtgttagaagctgcagcaggcatgtgggtaattgtggggagcttttaggaacagctagggagctgtgtggagctgcagagatgcagaggagcctggaggaacagaccagtgctgtgggctgggaggagcccccctcacaggtacttgctcaacggctccacgaccataagccttgaataagttacatggacattttacaaatggcacaggattgattatgtctgctgccagaagcctcatgtcgataaggagagagctggccaaaaggtaaagtatgctagctccatacagtgcaatagccacgtagtctcacagagaaagaggcaggcctgcatcatatccaaatatggccaagaattttattaaattaaaatgcaaacagcaaatgatagggacttagggtgatagaagtgcaaagcatgactgtcaaatttttggagcaggttttctgacttcggtcggaaaacccctctgaattttcttgcagttgaacaacagaggctttttttgtgtgtgtgggggtgcttggttttgggaggttgaagagtacttgttcgcaaactctctaaatgagagatggggaagtgtcttaccagctgattcgcgagagcacctgcaagtttacctgttttagtgatttgcgtttatgaaagttggagttgctgattttgtgatctctacttttaaggtaaaagcagggcggtgttgacttttcttgccagttggctgtcctgttttctttctcgcactgttttctttttgagacgaagtctgtcgctcaggctggagtgcactggcgtgatctcggctcgctgcaaactttgccgaacccctgtttagcgatttccgtttg

SEQ ID NO: 805 - DNA, 1087 bp, synthetic construct
  source 1..1087: mol_type = other DNA
ggcatgtgattttgttttgtttaggtttttttttaactttatttgatcaacatgaaataatacaataagctatgtcttctaaccagcaggcagccagccaggagccatgtgtagcagtgttagaagctgcagcaggcatgtgggtaattgtggggagcttttaggaacagctagggagctgtgtggagctgcagagatgcagaggagcctggaggaacagaccagtgctgtgggctgggaggagcccccctcacaggtacttgctcaacggctccacgaccataagccttgaataagttacatggacattttacaaatggcacaggattgattatgtctgctgccagaagcctcatgtcgataaggagagagctggccaaaaggtaaagtatgctagctccatacagtgcaatagccacgtagtctcacagagaaagaggcaggcctgcatcatatccaaatatggccaagaattttattaaattaaaatgcaaacagcaaatgatagggacttagggtgatagaagtgcaaagcatgactgtcaaatttttggagcaggttttctgacttcggtcggaaaacccctatatgtggtaatccaacaatagaaattatttttaagtttgtgtgttcctttttctgttcaatggtgcttttgatattgttgtaaagcagtgactagcagattctgtgtggtaaaagcactgaaccctgtttagttcttttctccctaccttattggtaattatttctgtgtatatatgttccaaagaaatgcggcttgtatattcatgcttttcaactttttgtgatagacagttgatacacaagtagtacctcctccgggatcttcttagtcaagactgtttggtagatgcatgttttttgttacttgtaatgtacagtattcagttcattttctttttgcagcactgtccggttgaaacacaacgcgaggatcgggcgtggtggctcacgcctgtaatcccagcactttgggaggccgaggcaggacaatcaagaccaatcctggtcatcaaggcaggagaatcaagaccatcgaggtcaggagatcaagaccatcct

SEQ ID NO: 806 - DNA, 1076 bp, synthetic construct
  source 1..1076: mol_type = other DNA
ttttgttttgtttaggtttttttttaactttatttgatcaacatgaaataatacaataagctatgtcttctaaccagcaggcagccagccaggagccatgtgtagcagtgttagaagctgcagcaggcatgtgggtaattgtggggagcttttaggaacagctagggagctgtgtggagctgcagagatgcagaggagcctggaggaacagaccagtgctgtgggctgggaggagcccccctcacaggtacttgctcaacggctccacgaccataagccttgaataagttacatggacattttacaaatggcacaggattgattatgtctgctgccagaagcctcatgtcgataaggagagagctggccaaaaggtaaagtatgctagctccatacagtgcaatagccacgtagtctcacagagaaagaggcaggcctgcatcatatccaaatatggccaagaattttattaaattaaaatgcaaacagcaaatgatagggacttagggtgatagaagtgcaaagcatgactgtcaaatttttggagcaggttttctgacttcggtcggaaaacccctacatcaggttgtttttctgtttttacatcaggttgtttttctgtttggttttttttttacaccacgtttatacgccggtgcacggtttaccactgaaaacacctttcatctacaggtgatatcttttaacacaaataaaatgtagtagtcctaggagacggaatagaaggaggtggggcctaggcagattcatctctgcggtgcattttgcctctggccctcgggccctagtttgcgatctttcccatcttgcctctgcttccctctgcacaatcctgagtattgcagtaccttacacttaaggaaatttcgtcttgccaaagttgatccatttcagctccgaaacataacaggaactagtgcaacgataaacgtatgaggaacttgcaataagagtgacagaatcctttgaatcaaaaaaaaaaaaagccaccacttaatgagtatctaccatatgtcaagggcttcaccaatatttcattgaaatattccagacca

SEQ ID NO: 807 - DNA, 1087 bp, synthetic construct
  source 1..1087: mol_type = other DNA
ggcatgtgattttgttttgtttaggtttttttttaactttatttgatcaacatgaaataatacaataagctatgtcttctaaccagcaggcagccagccaggagccatgtgtagcagtgttagaagctgcagcaggcatgtgggtaattgtggggagcttttaggaacagctagggagctgtgtggagctgcagagatgcagaggagcctggaggaacagaccagtgctgtgggctgggaggagcccccctcacaggtacttgctcaacggctccacgaccataagccttgaataagttacatggacattttacaaatggcacaggattgattatgtctgctgccagaagcctcatgtcgataaggagagagctggccaaaaggtaaagtatgctagctccatacagtgcaatagccacgtagtctcacagagaaagaggcaggcctgcatcatatccaaatatggccaagaattttattaaattaaaatgcaaacagcaaatgatagggacttagggtgatagaagtgcaaagcatgactgtcaaatttttggagcaggttttctgacttcggtcggaaaacccctcttatgatgtttgttgccaatgatagattgttttcactgtgcaaaaattatgggtagttttggtggtcttgatgcagttgtaagcttggggtatgaaggtttgggccacgcctgggcgcttccggctgcgccggatgctgtttcctttccgctcccaggggcgttgggaacggttgtaggacgtggctctttattcgtgagttttccatttacctccgctgaacctagagcttcagacgccctatggcgtccgcctcgacccaaccggcggccttgagcgctgagcaagcaaagggtgagaatcgtcctagtcaaggcataggctgctggcctggggtagtcaaggcatgggctgctggtctggggaggatgcgggcggaggatgtggggcgacaaacctggctacgtccgccgggaaaatggggtaggggacgccgggtaccgtccttctaagtggggcgcttgcccccaagacttgggatcttattgggttacctaca

SEQ ID NO: 808 - DNA, 1085 bp, synthetic construct
  source 1..1085: mol_type = other DNA
ggcatgtgattttgttttgtttaggtttttttttaactttatttgatcaacatgaaataatacaataagctatgtcttctaaccagcaggcagccagccaggagccatgtgtagcagtgttagaagctgcagcaggcatgtgggtaattgtggggagcttttaggaacagctagggagctgtgtggagctgcagagatgcagaggagcctggaggaacagaccagtgctgtgggctgggaggagcccccctcacaggtacttgctcaacggctccacgaccataagccttgaataagttacatggacattttacaaatggcacaggattgattatgtctgctgccagaagcctcatgtcgataaggagagagctggccaaaaggtaaagtatgctagctccatacagtgcaatagccacgtagtctcacagagaaagaggcaggcctgcatcatatccaaatatggccaagaattttattaaattaaaatgcaaacagcaaatgatagggacttagggtgatagaagtgcaaagcatgactgtcaaatttttggagcaggttttctgacttcggtcggaaaaccccttctttactgttatatgttaggcgaaatattacgcgtttggagtaagtggtgctttttgtaactgaaaagagattctgtgtgtgtttttttttttttagaggctgcatagttatttgtatgaaccgcaggtgacctaattagcaaggtaattcagacctgtatcctagcacttaagaagtggaagtgggataaccctgcgtgttctcgtgtgggaggctagcttaagcaacaaagcaggaaggccccaccaacaaaagaatttaaaaattatacgtgcgtggtggcgcgcgtatgaggaaattatttggcaactgtgttacagtatagcagcaaatggaatagacctagtccctgactttaggagacctgcctcagccccccgaatggctgggactacaggcgtgcgcctccgcgcccagctaatttttgcatttttggtagagacgggttcaccatgttggccaggatggtctccatctcttcatctggtgatccgcc

SEQ ID NO: 809 - DNA, 1087 bp, synthetic construct
  source 1..1087: mol_type = other DNA
ggcatgtgattttgttttgtttaggtttttttttaactttatttgatcaacatgaaataatacaataagctatgtcttctaaccagcaggcagccagccaggagccatgtgtagcagtgttagaagctgcagcaggcatgtgggtaattgtggggagcttttaggaacagctagggagctgtgtggagctgcagagatgcagaggagcctggaggaacagaccagtgctgtgggctgggaggagcccccctcacaggtacttgctcaacggctccacgaccataagccttgaataagttacatggacattttacaaatggcacaggattgattatgtctgctgccagaagcctcatgtcgataaggagagagctggccaaaaggtaaagtatgctagctccatacagtgcaatagccacgtagtctcacagagaaagaggcaggcctgcatcatatccaaatatggccaagaattttattaaattaaaatgcaaacagcaaatgatagggacttagggtgatagaagtgcaaagcatgactgtcaaatttttggagcaggttttctgacttcggtcggaaaacccctaccttattcacgcctaaaaagtagactgactgtggggtggtcgtgttttttgtttcttgttggtaggtggtgaatgcgtttttttcgttgttttctccgttactcaggctgccagttgcttggcagtcttgtcgctggctgtggacgctctgcacttcatcaccgtccccagctgcgctttgagccggtctaaggttgcccacagtattgacgttgggacccacgaaactggcaatttccatgtgtgcggccttacccagttctcccaaacttctgcgtataaccgcttctctgtgcttcagaaagataagtccggccccggcctcacacagcagctcagttcgtgacagcgtttaatatgtaaaatggagcaaataatttatagggcgttgggagagttaaagagactaattcatttacgtgttaaatacagggaatggcttttgcattgatataaccccagcctccagcatgcgccagacctgacgtaggtgttcggc

SEQ ID NO: 810 - DNA, 1087 bp, synthetic construct
  source 1..1087: mol_type = other DNA
ggcatgtgattttgttttgtttaggtttttttttaactttatttgatcaacatgaaataatacaataagctatgtcttctaaccagcaggcagccagccaggagccatgtgtagcagtgttagaagctgcagcaggcatgtgggtaattgtggggagcttttaggaacagctagggagctgtgtggagctgcagagatgcagaggagcctggaggaacagaccagtgctgtgggctgggaggagcccccctcacaggtacttgctcaacggctccacgaccataagccttgaataagttacatggacattttacaaatggcacaggattgattatgtctgctgccagaagcctcatgtcgataaggagagagctggccaaaaggtaaagtatgctagctccatacagtgcaatagccacgtagtctcacagagaaagaggcaggcctgcatcatatccaaatatggccaagaattttattaaattaaaatgcaaacagcaaatgatagggacttagggtgatagaagtgcaaagcatgactgtcaaatttttggagcaggttttctgacttcggtcggaaaaccccttttgacccattacccatctaagttagatgcttttttaaatgttttttaatttttaaatttttaatttttttcattatttattttttatttttgagacggatctcggctcactgtaacctccacctcccgggttcaagcgattctcctgactcagcctcccgagtagctgggattacaggcgcgcgccaccatgcccggctaatttttctatttttagtaaagacggggtttcgccatgttgaccagggtggtcttgaactcctgacgtcaggtgatcctcctgcctcgtgctgggattgcaggcgtgagccaccgctcccggcccttagatgctttttaatcagcaagtacgcaatgctttcctgacaggaatgtcaagtccgtcaggaaatccacataagggtgttaagcaggcaaagtaccacatacagattaaaatcaaaagcactgtcaacgcttatttaatttatacagtagaccctaacttttctaattttgtg

SEQ ID NO: 811 - DNA, 1087 bp, synthetic construct
  source 1..1087: mol_type = other DNA
ggcatgtgattttgttttgtttaggtttttttttaactttatttgatcaacatgaaataatacaataagctatgtcttctaaccagcaggcagccagccaggagccatgtgtagcagtgttagaagctgcagcaggcatgtgggtaattgtggggagcttttaggaacagctagggagctgtgtggagctgcagagatgcagaggagcctggaggaacagaccagtgctgtgggctgggaggagcccccctcacaggtacttgctcaacggctccacgaccataagccttgaataagttacatggacattttacaaatggcacaggattgattatgtctgctgccagaagcctcatgtcgataaggagagagctggccaaaaggtaaagtatgctagctccatacagtgcaatagccacgtagtctcacagagaaagaggcaggcctgcatcatatccaaatatggccaagaattttattaaattaaaatgcaaacagcaaatgatagggacttagggtgatagaagtgcaaagcatgactgtcaaatttttggagcaggttttctgacttcggtcggaaaacccctgtttacttggttttaaaaatagcttgcactagcgataccgcgaatatggttattaggtttgttaggcacagtcgtgtcttactatagaaaaataacgtagtgttcattttgctgcctgtatgtgttaatttgtccttattgcgccattgttcttgttaagtcttctgtaaggagttgcgggtttcaaactgtcagtctgagagcataagctcacttttcagtcagttgaattgaatgttacattcgattggttctggatattgatattacccaaggcttgtcctgtttgtaagtcttttcctacacctgacaatatgattatgtttacaatgtccctagaactctgggtgtatcgttcccactgaataaaatttgatctctaagttgacctataaatttaagtaccaaaaaactggtttgtaagattttggaaggcagaggcagggaagagaccaacgtggtctacatataaagtaccaggtacatataaagtaccaggt

SEQ ID NO: 812 - DNA, 1083 bp, synthetic construct
  source 1..1083: mol_type = other DNA
ggcatgtgattttgttttgtttaggtttttttttaactttatttgatcaacatgaaataatacaataagctatgtcttctaaccagcaggcagccagccaggagccatgtgtagcagtgttagaagctgcagcaggcatgtgggtaattgtggggagcttttaggaacagctagggagctgtgtggagctgcagagatgcagaggagcctggaggaacagaccagtgctgtgggctgggaggagcccccctcacaggtacttgctcaacggctccacgaccataagccttgaataagttacatggacattttacaaatggcacaggattgattatgtctgctgccagaagcctcatgtcgataaggagagagctggccaaaaggtaaagtatgctagctccatacagtgcaatagccacgtagtctcacagagaaagaggcaggcctgcatcatatccaaatatggccaagaattttattaaattaaaatgcaaacagcaaatgatagggacttagggtgatagaagtgcaaagcatgactgtcaaatttttggagcaggttttctgacttcggtcggaaaacccctatttttgtggtgctaaaagttagattgcattccgcccttctcacgtctctttacgtgttgtttgcgaggcgtggcctcggaggtaaatggtctccttttacctcagataagcttacctttgctctgtgagtaagaatgtagctacacttccaaatttagctattgtcctttgcggtccaaatgaaaatattaccttccgatctaacaatgttaaactagtcccaggcccttctatcgattgccagaatagactagactactacacagacacaccctctcaaatcaggccagctcctgcaacctgcacctacagtttgtcccctgggacaaatgaaaggacaggccctctttcccccccccccccaaatcagagcacacacagatcttggggtctggggcagaaatttcgttcatggaaaaaacaaacaaacaaacaaacacgatcaaaggaagctcgttccctttggcctcagggtttcttagacgccgtgttccc

SEQ ID NO: 813 - DNA, 1084 bp, synthetic construct
  source 1..1084: mol_type = other DNA
ggcatgtgattttgttttgtttaggtttttttttaactttatttgatcaacatgaaataatacaataagctatgtcttctaaccagcaggcagccagccaggagccatgtgtagcagtgttagaagctgcagcaggcatgtgggtaattgtggggagcttttaggaacagctagggagctgtgtggagctgcagagatgcagaggagcctggaggaacagaccagtgctgtgggctgggaggagcccccctcacaggtacttgctcaacggctccacgaccataagccttgaataagttacatggacattttacaaatggcacaggattgattatgtctgctgccagaagcctcatgtcgataaggagagagctggccaaaaggtaaagtatgctagctccatacagtgcaatagccacgtagtctcacagagaaagaggcaggcctgcatcatatccaaatatggccaagaattttattaaattaaaatgcaaacagcaaatgatagggacttagggtgatagaagtgcaaagcatgactgtcaaatttttggagcaggttttctgacttcggtcggaaaacccctataactggtaaccaaaagcagattactttcccccttgtggtcttcgcgtttgcggacgggagagaactttcggccattttccttttagaaatttaacttcttgaaggccaccaggtgacccttacttccctctcacctttccttctacctgtactttctctattaaaaagcctgcagaagtacccttgacaaattgccaaaaatgacacctaaaaaaaaaaaaaggaaaaacgacaccttaggtaattataggttgtaagaaaaagatttgacctcttggagtttttatttcttaataccaaaggacacccaaggaacgtatctctcaaaattgggtttcaaacctcagccgtttccttcttagttccagtgcttaacacgcaacagacctgcacaccactacactgcatacgagttttaaagttaataaatcagtcacccctccatagtcttctacctacttgaagacagaaacggctgctaggaagcaattcttc

SEQ ID NO: 814 - DNA, 1087 bp, synthetic construct
  source 1..1087: mol_type = other DNA
ggcatgtgattttgttttgtttaggtttttttttaactttatttgatcaacatgaaataatacaataagctatgtcttctaaccagcaggcagccagccaggagccatgtgtagcagtgttagaagctgcagcaggcatgtgggtaattgtggggagcttttaggaacagctagggagctgtgtggagctgcagagatgcagaggagcctggaggaacagaccagtgctgtgggctgggaggagcccccctcacaggtacttgctcaacggctccacgaccataagccttgaataagttacatggacattttacaaatggcacaggattgattatgtctgctgccagaagcctcatgtcgataaggagagagctggccaaaaggtaaagtatgctagctccatacagtgcaatagccacgtagtctcacagagaaagaggcaggcctgcatcatatccaaatatggccaagaattttattaaattaaaatgcaaacagcaaatgatagggacttagggtgatagaagtgcaaagcatgactgtcaaatttttggagcaggttttctgacttcggtcggaaaacccctctggggaataagagtggtttaaagaaagaacaatttgagagatctgcttagatctaataaaacccaagtatagtttctttagacgtcttatatctcacgtaggacctcttatttcagactcactgcaagaacaagctaaagaactatatacagtcaggaacaaggtgagccatcgcggttctcagtcccatgatcttaagagtttttcctcttcccctcttccctggctgtcctggagctcactctgtagaccaggctggtctcaaactcagaaatccacttacctctgcctcccaagggctgggattaaaggcatgcaccaccattgcccggcagggtatgtggactatgctgtccttcaactcagagatcgtggtactttaaatctcattttccgaaagaaaagaaaagaaaggaaggggggaaataaagccagtatattttgcacccacaatctgaagttctacaaatattgttagaaaatgcaaaggacccaagtc

SEQ ID NO: 815 - DNA, 1087 bp, synthetic construct
  source 1..1087: mol_type = other DNA
ggcatgtgattttgttttgtttaggtttttttttaactttatttgatcaacatgaaataatacaataagctatgtcttctaaccagcaggcagccagccaggagccatgtgtagcagtgttagaagctgcagcaggcatgtgggtaattgtggggagcttttaggaacagctagggagctgtgtggagctgcagagatgcagaggagcctggaggaacagaccagtgctgtgggctgggaggagcccccctcacaggtacttgctcaacggctccacgaccataagccttgaataagttacatggacattttacaaatggcacaggattgattatgtctgctgccagaagcctcatgtcgataaggagagagctggccaaaaggtaaagtatgctagctccatacagtgcaatagccacgtagtctcacagagaaagaggcaggcctgcatcatatccaaatatggccaagaattttattaaattaaaatgcaaacagcaaatgatagggacttagggtgatagaagtgcaaagcatgactgtcaaatttttggagcaggttttctgacttcggtcggaaaacccctctcggtttatcttaaagggttttaaatatagaaagcttccttagtcttatgggtgagagtgctgtttaagccttacctaggtatgtctttgaacatttattacagattgttatttgtgactatgaccactcaggtgttctgttcttgtgaatttagacacactcagaaaggctacacactcaaagaccacaccaaagtgaagtactatctgggccgtgaaactggtcacatatcagttattttgcagtaaaacaaggaagtcaatcatactgcttcagtgggtcagggagtcaagaatgcacagtacaagagctggtgagattcctcagcaggtaagagcactgaatgctcttccaaagattctgagttcaaatcccagcaaccacgtggtggatttgaacaaaggatgaaaacaaccatccataaccagatctgatgccctcttctggagtgtcaaaagacagctatggtgtacttacataaataaataagtaaaaaca

SEQ ID NO: 816 - DNA, 1087 bp, synthetic construct
  source 1..1087: mol_type = other DNA
ggcatgtgattttgttttgtttaggtttttttttaactttatttgatcaacatgaaataatacaataagctatgtcttctaaccagcaggcagccagccaggagccatgtgtagcagtgttagaagctgcagcaggcatgtgggtaattgtggggagcttttaggaacagctagggagctgtgtggagctgcagagatgcagaggagcctggaggaacagaccagtgctgtgggctgggaggagcccccctcacaggtacttgctcaacggctccacgaccataagccttgaataagttacatggacattttacaaatggcacaggattgattatgtctgctgccagaagcctcatgtcgataaggagagagctggccaaaaggtaaagtatgctagctccatacagtgcaatagccacgtagtctcacagagaaagaggcaggcctgcatcatatccaaatatggccaagaattttattaaattaaaatgcaaacagcaaatgatagggacttagggtgatagaagtgcaaagcatgactgtcaaatttttggagcaggttttctgacttcggtcggaaaacccctccacattttgtgtttaaaaatagaaatatttaagtgagatcagtttaaatctgctttatctagggtgtctaactgcttgcatctttttaacttttccttatttgtgagaaggtctgtaaaacttattatatgttagtacactgtagctgtcttcagacactccagaagagggattcagatcaccttacagatggttttgagccaccatgtggttgctgggatttgaactcaggacctttagaaaagtagttgggtgctcttacccgctgagccatctcaccagccctttttttttcttttttccagttcgggtttctctgtgtgtagccctggctgtcctggaactcattctgtagaccgggctggcctcgaactcagaaatctgcctgcctctgcctcccaagtgctgggattaaaggaatgtgccttcattgcccggctctagggctttttgttgttgtttgtttgtttgtttgtttgtttgcttttgtggatggcct

SEQ ID NO: 817 - DNA, 1087 bp, synthetic construct
  source 1..1087: mol_type = other DNA
ggcatgtgattttgttttgtttaggtttttttttaactttatttgatcaacatgaaataatacaataagctatgtcttctaaccagcaggcagccagccaggagccatgtgtagcagtgttagaagctgcagcaggcatgtgggtaattgtggggagcttttaggaacagctagggagctgtgtggagctgcagagatgcagaggagcctggaggaacagaccagtgctgtgggctgggaggagcccccctcacaggtacttgctcaacggctccacgaccataagccttgaataagttacatggacattttacaaatggcacaggattgattatgtctgctgccagaagcctcatgtcgataaggagagagctggccaaaaggtaaagtatgctagctccatacagtgcaatagccacgtagtctcacagagaaagaggcaggcctgcatcatatccaaatatggccaagaattttattaaattaaaatgcaaacagcaaatgatagggacttagggtgatagaagtgcaaagcatgactgtcaaatttttggagcaggttttctgacttcggtcggaaaacccctaaaaccagtaagggagaaaggtcaagtaacatataaaggaaggcctatcagaattacaccagacttttcaccagagactatgaaagccagaagagcctggacagatgttatacagacactaagagaacacaaatgccagcccaggctactatacctggccaaactctcaattaccatagatggagaaaccaaagtattccacgacaaaaacaaattcacacaatatctttccacgaatccagcccttcaaaggataatgacagaaaagaagcaatacaaggacggaaatcacgccctagaacaaccaagaaactaatcattcaacaaaccaaaaagaagacagccacaagaacagaatgccaactctaacaacaaaaataaaaggaagcaacaattacttttccttaatatctcttaatatcaatggactcaattccccaataaaaagacatagactaacagactggctacacaaacaggacccaacattctgctgctta

SEQ ID NO: 818 - DNA, 1087 bp, synthetic construct
  source 1..1087: mol_type = other DNA
ggcatgtgattttgttttgtttaggtttttttttaactttatttgatcaacatgaaataatacaataagctatgtcttctaaccagcaggcagccagccaggagccatgtgtagcagtgttagaagctgcagcaggcatgtgggtaattgtggggagcttttaggaacagctagggagctgtgtggagctgcagagatgcagaggagcctggaggaacagaccagtgctgtgggctgggaggagcccccctcacaggtacttgctcaacggctccacgaccataagccttgaataagttacatggacattttacaaatggcacaggattgattatgtctgctgccagaagcctcatgtcgataaggagagagctggccaaaaggtaaagtatgctagctccatacagtgcaatagccacgtagtctcacagagaaagaggcaggcctgcatcatatccaaatatggccaagaattttattaaattaaaatgcaaacagcaaatgatagggacttagggtgatagaagtgcaaagcatgactgtcaaatttttggagcaggttttctgacttcggtcggaaaacccctcccaatttcactggtctacaatgaaagcaaaacagttctcttccccgctccccggtgtgtgagaggggctttgatccttctctggtttcctaggaaacgcgtatgtgctagagccacgctctgagacttccgcctcgtgcggtcccgcttcctttctgcctcctctggcctgcatccgtgggggaggtggctggctgcagggttctccggatctcttctgtgttcccactactcaagcaccgagtggcgttctatggcgtccgcctcggctcagcccgcggccctgagcgcggagcaggccaagggtgaggaaagagcctagtctgggtgtgggccgtcttctggggggagggcgcgatactattctttgcctctccaagtggggcccttgcccattagggcgaagggttgggaggacaagcttatcgggttgcttgcaggcctcggcccactaattccctgcctcttccctcctctgggctcgcccgccgtcctccgcg

SEQ ID NO: 819 - DNA, 1087 bp, synthetic construct
  source 1..1087: mol_type = other DNA
ggcatgtgattttgttttgtttaggtttttttttaactttatttgatcaacatgaaataatacaataagctatgtcttctaaccagcaggcagccagccaggagccatgtgtagcagtgttagaagctgcagcaggcatgtgggtaattgtggggagcttttaggaacagctagggagctgtgtggagctgcagagatgcagaggagcctggaggaacagaccagtgctgtgggctgggaggagcccccctcacaggtacttgctcaacggctccacgaccataagccttgaataagttacatggacattttacaaatggcacaggattgattatgtctgctgccagaagcctcatgtcgataaggagagagctggccaaaaggtaaagtatgctagctccatacagtgcaatagccacgtagtctcacagagaaagaggcaggcctgcatcatatccaaatatggccaagaattttattaaattaaaatgcaaacagcaaatgatagggacttagggtgatagaagtgcaaagcatgactgtcaaatttttggagcaggttttctgacttcggtcggaaaacccctgaatttgttaaattacaggaggaagcttttttagttcattttacaaatactttcttgttaggtagataataccttctaaggttattatctggatcttctaagtctttttatcgctagcaagtctaagtttctggactttggaattagaagttaatgtcgtaggcgggcatggtggtccacgcctttaatcccagagtttgggaggcagacgcaggtggttttctgagttcgaggccatcctgctcttcaatgttagttccaggacagccagggttatacaaagaaaccctgtctcgagaaacaaaacaaacaaaaaaagagtagctgagtgctctgagttgtctctccagccccttagctatttattttcatttaaattatttttgttttattcgcttgtgtgcctgagtttgaatttcccgggattaacagttgaagactagggctggtgagatggctcagcggttaagattgccgactgctcttccaaaggtcctgag

SEQ ID NO: 820 - DNA, 1087 bp, synthetic construct
  source 1..1087: mol_type = other DNA
ggcatgtgattttgttttgtttaggtttttttttaactttatttgatcaacatgaaataatacaataagctatgtcttctaaccagcaggcagccagccaggagccatgtgtagcagtgttagaagctgcagcaggcatgtgggtaattgtggggagcttttaggaacagctagggagctgtgtggagctgcagagatgcagaggagcctggaggaacagaccagtgctgtgggctgggaggagcccccctcacaggtacttgctcaacggctccacgaccataagccttgaataagttacatggacattttacaaatggcacaggattgattatgtctgctgccagaagcctcatgtcgataaggagagagctggccaaaaggtaaagtatgctagctccatacagtgcaatagccacgtagtctcacagagaaagaggcaggcctgcatcatatccaaatatggccaagaattttattaaattaaaatgcaaacagcaaatgatagggacttagggtgatagaagtgcaaagcatgactgtcaaatttttggagcaggttttctgacttcggtcggaaaacccctaccccctaattctacaagaatagaaagcttagcagctcctctgaatggttgctctcaggtgctagtggttgcaagtcgtatgttgatgcctgcctttgccctacctggtgtgtgagcgtgagcgcgccccacctctccagcctctctcttactgtttttcagacaagatgggactgttgttctcctactgctatgtacctcaatttcaattgatcatgcctggacataactgcccatgttgtaaggtcgtctacgttgtaaggtcgtgctcagtttctgatgcctagactagtcacctttccgtttgcctcctgactgtgtaaatgaggcaaatgaaggtggtctcttaactgacatgttagtgtttgacctatgggatagtttctcattgttgagacagaatttctagaagctggtccgctgagcggctaagagcacttgctgatattgcaaaggatctacctgggtttggttctcagcactcacatggaagttcacat

SEQ ID NO: 821 - DNA, 654 bp, synthetic construct
  source 1..654: mol_type = other DNA
ggcatgtgattttgttttgtttaggtttttttttaactttatttgatcaacatgaaataatacaataagctatgtcttctaaccagcaggcagccagccaggagccatgtgtagcagtgttagaagctgcagcaggcatgtgggtaattgtggggagcttttaggaacagctagggagctgtgtggagctgcagagatgcagaggagcctggaggaacagaccagtgctgtgggctgggaggagcccccctcacaggtacttgctcaacggctccacgaccataagccttgaataagttacatggacattttacaaatggcacaggattgattatgtctgctgccagaagcctcatgtcgataaggagagagctggccaaaaggtaaagtatgctagctccatacagtgcaatagccacgtagtctcacagagaaagaggcaggcctgcatcatatccaaatatggccaagaattttattaaattaaaatgcaaacagcaaatgatagggacttagggtgatagaagtgcaaagcatgactgtcaaatttttggagcaggttttctgacttcggtcggaaaaccccttgtagttcctgcaatttaattttcgtttaaaactttattttattctttaacttaaaaaaaatatata

SEQ ID NO: 822 - DNA, 1087 bp, synthetic construct
  source 1..1087: mol_type = other DNA
tatttttaatgaagcagggccatggagcccaagctggccttgaacttctcagcttttgtgctggtatcacagaaatgtggcgctatgcccggtcgggcctgatgttccagagtctttgcagtgtggggaacttgtaaggatgagactacaagacatcgggccacatcgcctgccactacttaagtccgattcacttcggctttagctccaagcctttaatctcgcgaagctctttttttttttttaacaacataggagctgtgattggctgttttcagccaatcagcactgactcatttgcatagcctttacaagcggtcacaaactcaagaaacgagcggttttaatagtcttttagaatattgtttatcgaaccgaataaggaactgtgctttgtgattcacatatcagtggaggggtgtggaaatggcaccttgatctcaccctcatcgaaagtggagttgatgtccttccctggctcgctacagacgcacttccgcaatgatagggacttagggtgatagaagtgcaaagcatgactgtcaaatttttggagcaggttttctgacttcggtcggaaaacccctactttctggagtttcaaaaacagactgtacgccaagggtcatatctttttttgtattggtttgtgtcttggttggtgtcttaggtgttaatcctacagtggagggtttatgggaataggaagtaacatgtcgcctgcatgtcataggagaaaaagcgagcatcagccgtatcggctttgtaacacaaattagctatcgtgaagtccgctcagctcttccctttctaccctggctgctttttgcagggattggtccgtggtctccagtctcttgggttctcaccctgtgtgaaaatcttcgtgtttttccctaccccccagtcacctcttacacagcctctgcttccaagcgcagcccccacaggagtttgtaggatttctgtgctagcggggaatgtgttctcacctcatagagccaggtagaaattatgcagatgggcagttctctgggaagaaagcagggcctttggggctctcagtgtccccgttgggttgtagaca

SEQ ID NO: 823 - DNA, 1087 bp, synthetic construct
  source 1..1087: mol_type = other DNA
tatttttaatgaagcagggccatggagcccaagctggccttgaacttctcagcttttgtgctggtatcacagaaatgtggcgctatgcccggtcgggcctgatgttccagagtctttgcagtgtggggaacttgtaaggatgagactacaagacatcgggccacatcgcctgccactacttaagtccgattcacttcggctttagctccaagcctttaatctcgcgaagctctttttttttttttaacaacataggagctgtgattggctgttttcagccaatcagcactgactcatttgcatagcctttacaagcggtcacaaactcaagaaacgagcggttttaatagtcttttagaatattgtttatcgaaccgaataaggaactgtgctttgtgattcacatatcagtggaggggtgtggaaatggcaccttgatctcaccctcatcgaaagtggagttgatgtccttccctggctcgctacagacgcacttccgcaatgatagggacttagggtgatagaagtgcaaagcatgactgtcaaatttttggagcaggttttctgacttcggtcggaaaacccctactttctggagtttctaaaagtagactgtacgctaagggtcatatctttttttgttttggtttgtgtcttggttggcgtcttaaatgttaatcctacagtggagggctggcgaataggaagtaacatgtcgcctgcacgccataggagaaaaagcgagcatcagccgtatcggctttgtaacacaaattagctatcgtgaagtccgctcagctcttccctttctaccctggctgctttttgcagggattggtccgtggtctccagtctcttgggttctcaccctgtgtgaaaatcttcctgtttttccctaccccccaagtcacctcttacacagcctctgcttccaagcgcagcccccacaggagtttgtaggatttctgtgctagcggggagtgtgttctcacctcatagagccaggtagaaactacgcagatgggtgctgttctccaggaagaaagcagggcctttggggctctcagtgtccccgttgggttgtaga

SEQ ID NO: 824 - DNA, 1087 bp, synthetic construct
  source 1..1087: mol_type = other DNA
tatttttaatgaagcagggccatggagcccaagctggccttgaacttctcagcttttgtgctggtatcacagaaatgtggcgctatgcccggtcgggcctgatgttccagagtctttgcagtgtggggaacttgtaaggatgagactacaagacatcgggccacatcgcctgccactacttaagtccgattcacttcggctttagctccaagcctttaatctcgcgaagctctttttttttttttaacaacataggagctgtgattggctgttttcagccaatcagcactgactcatttgcatagcctttacaagcggtcacaaactcaagaaacgagcggttttaatagtcttttagaatattgtttatcgaaccgaataaggaactgtgctttgtgattcacatatcagtggaggggtgtggaaatggcaccttgatctcaccctcatcgaaagtggagttgatgtccttccctggctcgctacagacgcacttccgcaatgatagggacttagggtgatagaagtgcaaagcatgactgtcaaatttttggagcaggttttctgacttcggtcggaaaacccctactttctggagtttcaaaaacagaccgtacgccaagggtcatgtcttttttcgtattggtttgtgtcttagttgttaatcctacagtggaggcctggggaataagaagtaacatgtggcctgcacgccataggagaaaaagcgagcatcagccgtatcggctttgtaacacaaattagctatcgtgaagtccgctcagctcttccatttctaccctggctgctttttgcagggattggtccgtggtctccagtctcttgggttctcaccctgtgtgaaaatcttcgtgtttttccctaccccccaagtcacctcttacacagcctctgcttccaagcgcagcccccacaggagtttgtaggatttctgtgctagcggggagtgtgttctcacctcatagagccaggtagaaattatgcagatgggcgctgttctctgggaagaaagcagggcctttggggctctcagtgtccccgttgggttgtagacataacactctta

SEQ ID NO: 825 - DNA, 891 bp, synthetic construct
  source 1..891: mol_type = other DNA
tatttttaatgaagcagggccatggagcccaagctggccttgaacttctcagcttttgtgctggtatcacagaaatgtggcgctatgcccggtcgggcctgatgttccagagtctttgcagtgtggggaacttgtaaggatgagactacaagacatcgggccacatcgcctgccactacttaagtccgattcacttcggctttagctccaagcctttaatctcgcgaagctctttttttttttttaacaacataggagctgtgattggctgttttcagccaatcagcactgactcatttgcatagcctttacaagcggtcacaaactcaagaaacgagcggttttaatagtcttttagaatattgtttatcgaaccgaataaggaactgtgctttgtgattcacatatcagtggaggggtgtggaaatggcaccttgatctcaccctcatcgaaagtggagttgatgtccttccctggctcgctacagacgcacttccgcaatgatagggacttagggtgatagaagtgcaaagcatgactgtcaaatttttggagcaggttttctgacttcggtcggaaaacccctcctccggggatacaacgtgtttcctaaaagtagagggaggtaagagacggtagcacctgcggggcggcttgcacgccgagtgcctgtgacgcgccggcttaacttaactgcttccctgaagtaccttgaggttcctgatgtgcgggcggtagacggtaggcttatgcggcacgctgtcgtttccaccgtggctactgcgctttgggaaggccacgacctcctcctttggggaggtccttaggatctcagcttggcagtcgagtgggtggcgaccttttaaaggaatgggacccacccggagttc

SEQ ID NO: 826 - DNA, 1079 bp, synthetic construct
  source 1..1079: mol_type = other DNA
tatttttaatgaagcagggccatggagcccaagctggccttgaacttctcagcttttgtgctggtatcacagaaatgtggcgctatgcccggtcgggcctgatgttccagagtctttgcagtgtggggaacttgtaaggatgagactacaagacatcgggccacatcgcctgccactacttaagtccgattcacttcggctttagctccaagcctttaatctcgcgaagctctttttttttttttaacaacataggagctgtgattggctgttttcagccaatcagcactgactcatttgcatagcctttacaagcggtcacaaactcaagaaacgagcggttttaatagtcttttagaatattgtttatcgaaccgaataaggaactgtgctttgtgattcacatatcagtggaggggtgtggaaatggcaccttgatctcaccctcatcgaaagtggagttgatgtccttccctggctcgctacagacgcacttccgcaatgatagggacttagggtgatagaagtgcaaagcatgactgtcaaatttttggagcaggttttctgacttcggtcggaaaacccctttcccttcttgtaatacaaaataataacaaccacagaggacatcgcaagtaaaatgtgtataacaaccccatctaaagaaccctatcatctttctactatctgtctacctaaatatgtatagtataaataaccctatatagcactctaagcaacttaagttaggtaacttagaaaactcttttttttttttgagactgagtctcactctgtcgcacccaggctggagtgcagtggcgtgatctcggctcactgcaacctccaccttctgggttcaagtgattctcccatctcagtctcccaagtagctgggattacaggcacgccaccatgccctgctacatttttttttttttagtagagatgaggtttcaccacattggccaggctgttctcgaactcctgacctcaggtgatccgcccaccttggcctcatgaagtgctgggattacaggtgtgagccactgtacccagccagaaaactcttaaaaaac

SEQ ID NO: 827 - DNA, 969 bp, synthetic construct
  source 1..969: mol_type = other DNA
tatttttaatgaagcagggccatggagcccaagctggccttgaacttctcagcttttgtgctggtatcacagaaatgtggcgctatgcccggtcgggcctgatgttccagagtctttgcagtgtggggaacttgtaaggatgagactacaagacatcgggccacatcgcctgccactacttaagtccgattcacttcggctttagctccaagcctttaatctcgcgaagctctttttttttttttaacaacataggagctgtgattggctgttttcagccaatcagcactgactcatttgcatagcctttacaagcggtcacaaactcaagaaacgagcggttttaatagtcttttagaatattgtttatcgaaccgaataaggaactgtgctttgtgattcacatatcagtggaggggtgtggaaatggcaccttgatctcaccctcatcgaaagtggagttgatgtccttccctggctcgctacagacgcacttccgcaatgatagggacttagggtgatagaagtgcaaagcatgactgtcaaatttttggagcaggttttctgacttcggtcggaaaacccctctgaattttcttgcagttgaacaacagaggctttttttgtgtgtgtgggggtgcttggttttgggaggttgaagagtacttgttcgcaaactctctaaatgagagatggggaagtgtcttaccagctgattcgcgagagcacctgcaagtttacctgttttagtgatttgcgtttatgaaagttggagttgctgattttgtgatctctacttttaaggtaaaagcagggcggtgttgacttttcttgccagttggctgtcctgttttctttctcgcactgttttctttttgagacgaagtctgtcgctcaggctggagtgcactggcgtgatctcggctcgctgcaaactttgccgaacccctgtttagcgatttccgtttg

SEQ ID NO: 828 - DNA, 1087 bp, synthetic construct
  source 1..1087: mol_type = other DNA
tatttttaatgaagcagggccatggagcccaagctggccttgaacttctcagcttttgtgctggtatcacagaaatgtggcgctatgcccggtcgggcctgatgttccagagtctttgcagtgtggggaacttgtaaggatgagactacaagacatcgggccacatcgcctgccactacttaagtccgattcacttcggctttagctccaagcctttaatctcgcgaagctctttttttttttttaacaacataggagctgtgattggctgttttcagccaatcagcactgactcatttgcatagcctttacaagcggtcacaaactcaagaaacgagcggttttaatagtcttttagaatattgtttatcgaaccgaataaggaactgtgctttgtgattcacatatcagtggaggggtgtggaaatggcaccttgatctcaccctcatcgaaagtggagttgatgtccttccctggctcgctacagacgcacttccgcaatgatagggacttagggtgatagaagtgcaaagcatgactgtcaaatttttggagcaggttttctgacttcggtcggaaaacccctatatgtggtaatccaacaatagaaattatttttaagtttgtgtgttcctttttctgttcaatggtgcttttgatattgttgtaaagcagtgactagcagattctgtgtggtaaaagcactgaaccctgtttagttcttttctccctaccttattggtaattatttctgtgtatatatgttccaaagaaatgcggcttgtatattcatgcttttcaactttttgtgatagacagttgatacacaagtagtacctcctccgggatcttcttagtcaagactgtttggtagatgcatgttttttgttacttgtaatgtacagtattcagttcattttctttttgcagcactgtccggttgaaacacaacgcgaggatcgggcgtggtggctcacgcctgtaatcccagcactttgggaggccgaggcaggacaatcaagaccaatcctggtcatcaaggcaggagaatcaagaccatcgaggtcaggagatcaagaccatcct

SEQ ID NO: 829 - DNA, 1085 bp, synthetic construct
  source 1..1085: mol_type = other DNA
tatttttaatgaagcagggccatggagcccaagctggccttgaacttctcagcttttgtgctggtatcacagaaatgtggcgctatgcccggtcgggcctgatgttccagagtctttgcagtgtggggaacttgtaaggatgagactacaagacatcgggccacatcgcctgccactacttaagtccgattcacttcggctttagctccaagcctttaatctcgcgaagctctttttttttttttaacaacataggagctgtgattggctgttttcagccaatcagcactgactcatttgcatagcctttacaagcggtcacaaactcaagaaacgagcggttttaatagtcttttagaatattgtttatcgaaccgaataaggaactgtgctttgtgattcacatatcagtggaggggtgtggaaatggcaccttgatctcaccctcatcgaaagtggagttgatgtccttccctggctcgctacagacgcacttccgcaatgatagggacttagggtgatagaagtgcaaagcatgactgtcaaatttttggagcaggttttctgacttcggtcggaaaacccctacatcaggttgtttttctgtttttacatcaggttgtttttctgtttggttttttttttacaccacgtttatacgccggtgcacggtttaccactgaaaacacctttcatctacaggtgatatcttttaacacaaataaaatgtagtagtcctaggagacggaatagaaggaggtggggcctaggcagattcatctctgcggtgcattttgcctctggccctcgggccctagtttgcgatctttcccatcttgcctctgcttccctctgcacaatcctgagtattgcagtaccttacacttaaggaaatttcgtcttgccaaagttgatccatttcagctccgaaacataacaggaactagtgcaacgataaacgtatgaggaacttgcaataagagtgacagaatcctttgaatcaaaaaaaaaaaaagccaccacttaatgagtatctaccatatgtcaagggcttcaccaatatttcattgaaatattccagacca

SEQ ID NO: 830 - DNA, 1087 bp, synthetic construct
  source 1..1087: mol_type = other DNA
tatttttaatgaagcagggccatggagcccaagctggccttgaacttctcagcttttgtgctggtatcacagaaatgtggcgctatgcccggtcgggcctgatgttccagagtctttgcagtgtggggaacttgtaaggatgagactacaagacatcgggccacatcgcctgccactacttaagtccgattcacttcggctttagctccaagcctttaatctcgcgaagctctttttttttttttaacaacataggagctgtgattggctgttttcagccaatcagcactgactcatttgcatagcctttacaagcggtcacaaactcaagaaacgagcggttttaatagtcttttagaatattgtttatcgaaccgaataaggaactgtgctttgtgattcacatatcagtggaggggtgtggaaatggcaccttgatctcaccctcatcgaaagtggagttgatgtccttccctggctcgctacagacgcacttccgcaatgatagggacttagggtgatagaagtgcaaagcatgactgtcaaatttttggagcaggttttctgacttcggtcggaaaacccctcttatgatgtttgttgccaatgatagattgttttcactgtgcaaaaattatgggtagttttggtggtcttgatgcagttgtaagcttggggtatgaaggtttgggccacgcctgggcgcttccggctgcgccggatgctgtttcctttccgctcccaggggcgttgggaacggttgtaggacgtggctctttattcgtgagttttccatttacctccgctgaacctagagcttcagacgccctatggcgtccgcctcgacccaaccggcggccttgagcgctgagcaagcaaagggtgagaatcgtcctagtcaaggcataggctgctggcctggggtagtcaaggcatgggctgctggtctggggaggatgcgggcggaggatgtggggcgacaaacctggctacgtccgccgggaaaatggggtaggggacgccgggtaccgtccttctaagtggggcgcttgcccccaagacttgggatcttattgggttacctaca

SEQ ID NO: 831 - DNA, 1085 bp, synthetic construct
  source 1..1085: mol_type = other DNA
tatttttaatgaagcagggccatggagcccaagctggccttgaacttctcagcttttgtgctggtatcacagaaatgtggcgctatgcccggtcgggcctgatgttccagagtctttgcagtgtggggaacttgtaaggatgagactacaagacatcgggccacatcgcctgccactacttaagtccgattcacttcggctttagctccaagcctttaatctcgcgaagctctttttttttttttaacaacataggagctgtgattggctgttttcagccaatcagcactgactcatttgcatagcctttacaagcggtcacaaactcaagaaacgagcggttttaatagtcttttagaatattgtttatcgaaccgaataaggaactgtgctttgtgattcacatatcagtggaggggtgtggaaatggcaccttgatctcaccctcatcgaaagtggagttgatgtccttccctggctcgctacagacgcacttccgcaatgatagggacttagggtgatagaagtgcaaagcatgactgtcaaatttttggagcaggttttctgacttcggtcggaaaaccccttctttactgttatatgttaggcgaaatattacgcgtttggagtaagtggtgctttttgtaactgaaaagagattctgtgtgtgtttttttttttttagaggctgcatagttatttgtatgaaccgcaggtgacctaattagcaaggtaattcagacctgtatcctagcacttaagaagtggaagtgggataaccctgcgtgttctcgtgtgggaggctagcttaagcaacaaagcaggaaggccccaccaacaaaagaatttaaaaattatacgtgcgtggtggcgcgcgtatgaggaaattatttggcaactgtgttacagtatagcagcaaatggaatagacctagtccctgactttaggagacctgcctcagccccccgaatggctgggactacaggcgtgcgcctccgcgcccagctaatttttgcatttttggtagagacgggttcaccatgttggccaggatggtctccatctcttcatctggtgatccgcc

SEQ ID NO: 832 - DNA, 1087 bp, synthetic construct
  source 1..1087: mol_type = other DNA
tatttttaatgaagcagggccatggagcccaagctggccttgaacttctcagcttttgtgctggtatcacagaaatgtggcgctatgcccggtcgggcctgatgttccagagtctttgcagtgtggggaacttgtaaggatgagactacaagacatcgggccacatcgcctgccactacttaagtccgattcacttcggctttagctccaagcctttaatctcgcgaagctctttttttttttttaacaacataggagctgtgattggctgttttcagccaatcagcactgactcatttgcatagcctttacaagcggtcacaaactcaagaaacgagcggttttaatagtcttttagaatattgtttatcgaaccgaataaggaactgtgctttgtgattcacatatcagtggaggggtgtggaaatggcaccttgatctcaccctcatcgaaagtggagttgatgtccttccctggctcgctacagacgcacttccgcaatgatagggacttagggtgatagaagtgcaaagcatgactgtcaaatttttggagcaggttttctgacttcggtcggaaaacccctaccttattcacgcctaaaaagtagactgactgtggggtggtcgtgttttttgtttcttgttggtaggtggtgaatgcgtttttttcgttgttttctccgttactcaggctgccagttgcttggcagtcttgtcgctggctgtggacgctctgcacttcatcaccgtccccagctgcgctttgagccggtctaaggttgcccacagtattgacgttgggacccacgaaactggcaatttccatgtgtgcggccttacccagttctcccaaacttctgcgtataaccgcttctctgtgcttcagaaagataagtccggccccggcctcacacagcagctcagttcgtgacagcgtttaatatgtaaaatggagcaaataatttatagggcgttgggagagttaaagagactaattcatttacgtgttaaatacagggaatggcttttgcattgatataaccccagcctccagcatgcgccagacctgacgtaggtgttcggc

SEQ ID NO: 833 - DNA, 1087 bp, synthetic construct
  source 1..1087: mol_type = other DNA
tatttttaatgaagcagggccatggagcccaagctggccttgaacttctcagcttttgtgctggtatcacagaaatgtggcgctatgcccggtcgggcctgatgttccagagtctttgcagtgtggggaacttgtaaggatgagactacaagacatcgggccacatcgcctgccactacttaagtccgattcacttcggctttagctccaagcctttaatctcgcgaagctctttttttttttttaacaacataggagctgtgattggctgttttcagccaatcagcactgactcatttgcatagcctttacaagcggtcacaaactcaagaaacgagcggttttaatagtcttttagaatattgtttatcgaaccgaataaggaactgtgctttgtgattcacatatcagtggaggggtgtggaaatggcaccttgatctcaccctcatcgaaagtggagttgatgtccttccctggctcgctacagacgcacttccgcaatgatagggacttagggtgatagaagtgcaaagcatgactgtcaaatttttggagcaggttttctgacttcggtcggaaaaccccttttgacccattacccatctaagttagatgcttttttaaatgttttttaatttttaaatttttaatttttttcattatttattttttatttttgagacggatctcggctcactgtaacctccacctcccgggttcaagcgattctcctgactcagcctcccgagtagctgggattacaggcgcgcgccaccatgcccggctaatttttctatttttagtaaagacggggtttcgccatgttgaccagggtggtcttgaactcctgacgtcaggtgatcctcctgcctcgtgctgggattgcaggcgtgagccaccgctcccggcccttagatgctttttaatcagcaagtacgcaatgctttcctgacaggaatgtcaagtccgtcaggaaatccacataagggtgttaagcaggcaaagtaccacatacagattaaaatcaaaagcactgtcaacgcttatttaatttatacagtagaccctaacttttctaattttgtg

SEQ ID NO: 834 - DNA, 1087 bp, synthetic construct
  source 1..1087: mol_type = other DNA
tatttttaatgaagcagggccatggagcccaagctggccttgaacttctcagcttttgtgctggtatcacagaaatgtggcgctatgcccggtcgggcctgatgttccagagtctttgcagtgtggggaacttgtaaggatgagactacaagacatcgggccacatcgcctgccactacttaagtccgattcacttcggctttagctccaagcctttaatctcgcgaagctctttttttttttttaacaacataggagctgtgattggctgttttcagccaatcagcactgactcatttgcatagcctttacaagcggtcacaaactcaagaaacgagcggttttaatagtcttttagaatattgtttatcgaaccgaataaggaactgtgctttgtgattcacatatcagtggaggggtgtggaaatggcaccttgatctcaccctcatcgaaagtggagttgatgtccttccctggctcgctacagacgcacttccgcaatgatagggacttagggtgatagaagtgcaaagcatgactgtcaaatttttggagcaggttttctgacttcggtcggaaaacccctgtttacttggttttaaaaatagcttgcactagcgataccgcgaatatggttattaggtttgttaggcacagtcgtgtcttactatagaaaaataacgtagtgttcattttgctgcctgtatgtgttaatttgtccttattgcgccattgttcttgttaagtcttctgtaaggagttgcgggtttcaaactgtcagtctgagagcataagctcacttttcagtcagttgaattgaatgttacattcgattggttctggatattgatattacccaaggcttgtcctgtttgtaagtcttttcctacacctgacaatatgattatgtttacaatgtccctagaactctgggtgtatcgttcccactgaataaaatttgatctctaagttgacctataaatttaagtaccaaaaaactggtttgtaagattttggaaggcagaggcagggaagagaccaacgtggtctacatataaagtaccaggtacatataaagtaccaggt

SEQ ID NO: 835 - DNA, 1083 bp, synthetic construct
  source 1..1083: mol_type = other DNA
tatttttaatgaagcagggccatggagcccaagctggccttgaacttctcagcttttgtgctggtatcacagaaatgtggcgctatgcccggtcgggcctgatgttccagagtctttgcagtgtggggaacttgtaaggatgagactacaagacatcgggccacatcgcctgccactacttaagtccgattcacttcggctttagctccaagcctttaatctcgcgaagctctttttttttttttaacaacataggagctgtgattggctgttttcagccaatcagcactgactcatttgcatagcctttacaagcggtcacaaactcaagaaacgagcggttttaatagtcttttagaatattgtttatcgaaccgaataaggaactgtgctttgtgattcacatatcagtggaggggtgtggaaatggcaccttgatctcaccctcatcgaaagtggagttgatgtccttccctggctcgctacagacgcacttccgcaatgatagggacttagggtgatagaagtgcaaagcatgactgtcaaatttttggagcaggttttctgacttcggtcggaaaacccctatttttgtggtgctaaaagttagattgcattccgcccttctcacgtctctttacgtgttgtttgcgaggcgtggcctcggaggtaaatggtctccttttacctcagataagcttacctttgctctgtgagtaagaatgtagctacacttccaaatttagctattgtcctttgcggtccaaatgaaaatattaccttccgatctaacaatgttaaactagtcccaggcccttctatcgattgccagaatagactagactactacacagacacaccctctcaaatcaggccagctcctgcaacctgcacctacagtttgtcccctgggacaaatgaaaggacaggccctctttcccccccccccccaaatcagagcacacacagatcttggggtctggggcagaaatttcgttcatggaaaaaacaaacaaacaaacaaacacgatcaaaggaagctcgttccctttggcctcagggtttcttagacgccgtgttccc

SEQ ID NO: 836 - DNA, 1084 bp, synthetic construct
  source 1..1084: mol_type = other DNA
tatttttaatgaagcagggccatggagcccaagctggccttgaacttctcagcttttgtgctggtatcacagaaatgtggcgctatgcccggtcgggcctgatgttccagagtctttgcagtgtggggaacttgtaaggatgagactacaagacatcgggccacatcgcctgccactacttaagtccgattcacttcggctttagctccaagcctttaatctcgcgaagctctttttttttttttaacaacataggagctgtgattggctgttttcagccaatcagcactgactcatttgcatagcctttacaagcggtcacaaactcaagaaacgagcggttttaatagtcttttagaatattgtttatcgaaccgaataaggaactgtgctttgtgattcacatatcagtggaggggtgtggaaatggcaccttgatctcaccctcatcgaaagtggagttgatgtccttccctggctcgctacagacgcacttccgcaatgatagggacttagggtgatagaagtgcaaagcatgactgtcaaatttttggagcaggttttctgacttcggtcggaaaacccctataactggtaaccaaaagcagattactttcccccttgtggtcttcgcgtttgcggacgggagagaactttcggccattttccttttagaaatttaacttcttgaaggccaccaggtgacccttacttccctctcacctttccttctacctgtactttctctattaaaaagcctgcagaagtacccttgacaaattgccaaaaatgacacctaaaaaaaaaaaaaggaaaaacgacaccttaggtaattataggttgtaagaaaaagatttgacctcttggagtttttatttcttaataccaaaggacacccaaggaacgtatctctcaaaattgggtttcaaacctcagccgtttccttcttagttccagtgcttaacacgcaacagacctgcacaccactacactgcatacgagttttaaagttaataaatcagtcacccctccatagtcttctacctacttgaagacagaaacggctgctaggaagcaattcttc

SEQ ID NO: 837 - DNA, 1087 bp, synthetic construct
  source 1..1087: mol_type = other DNA
tatttttaatgaagcagggccatggagcccaagctggccttgaacttctcagcttttgtgctggtatcacagaaatgtggcgctatgcccggtcgggcctgatgttccagagtctttgcagtgtggggaacttgtaaggatgagactacaagacatcgggccacatcgcctgccactacttaagtccgattcacttcggctttagctccaagcctttaatctcgcgaagctctttttttttttttaacaacataggagctgtgattggctgttttcagccaatcagcactgactcatttgcatagcctttacaagcggtcacaaactcaagaaacgagcggttttaatagtcttttagaatattgtttatcgaaccgaataaggaactgtgctttgtgattcacatatcagtggaggggtgtggaaatggcaccttgatctcaccctcatcgaaagtggagttgatgtccttccctggctcgctacagacgcacttccgcaatgatagggacttagggtgatagaagtgcaaagcatgactgtcaaatttttggagcaggttttctgacttcggtcggaaaacccctctggggaataagagtggtttaaagaaagaacaatttgagagatctgcttagatctaataaaacccaagtatagtttctttagacgtcttatatctcacgtaggacctcttatttcagactcactgcaagaacaagctaaagaactatatacagtcaggaacaaggtgagccatcgcggttctcagtcccatgatcttaagagtttttcctcttcccctcttccctggctgtcctggagctcactctgtagaccaggctggtctcaaactcagaaatccacttacctctgcctcccaagggctgggattaaaggcatgcaccaccattgcccggcagggtatgtggactatgctgtccttcaactcagagatcgtggtactttaaatctcattttccgaaagaaaagaaaagaaaggaaggggggaaataaagccagtatattttgcacccacaatctgaagttctacaaatattgttagaaaatgcaaaggacccaagtc

SEQ ID NO: 838 - DNA, 1087 bp, synthetic construct
  source 1..1087: mol_type = other DNA
tatttttaatgaagcagggccatggagcccaagctggccttgaacttctcagcttttgtgctggtatcacagaaatgtggcgctatgcccggtcgggcctgatgttccagagtctttgcagtgtggggaacttgtaaggatgagactacaagacatcgggccacatcgcctgccactacttaagtccgattcacttcggctttagctccaagcctttaatctcgcgaagctctttttttttttttaacaacataggagctgtgattggctgttttcagccaatcagcactgactcatttgcatagcctttacaagcggtcacaaactcaagaaacgagcggttttaatagtcttttagaatattgtttatcgaaccgaataaggaactgtgctttgtgattcacatatcagtggaggggtgtggaaatggcaccttgatctcaccctcatcgaaagtggagttgatgtccttccctggctcgctacagacgcacttccgcaatgatagggacttagggtgatagaagtgcaaagcatgactgtcaaatttttggagcaggttttctgacttcggtcggaaaacccctctcggtttatcttaaagggttttaaatatagaaagcttccttagtcttatgggtgagagtgctgtttaagccttacctaggtatgtctttgaacatttattacagattgttatttgtgactatgaccactcaggtgttctgttcttgtgaatttagacacactcagaaaggctacacactcaaagaccacaccaaagtgaagtactatctgggccgtgaaactggtcacatatcagttattttgcagtaaaacaaggaagtcaatcatactgcttcagtgggtcagggagtcaagaatgcacagtacaagagctggtgagattcctcagcaggtaagagcactgaatgctcttccaaagattctgagttcaaatcccagcaaccacgtggtggatttgaacaaaggatgaaaacaaccatccataaccagatctgatgccctcttctggagtgtcaaaagacagctatggtgtacttacataaataaataagtaaaaaca

SEQ ID NO: 839 - DNA, 1087 bp, synthetic construct
  source 1..1087: mol_type = other DNA
tatttttaatgaagcagggccatggagcccaagctggccttgaacttctcagcttttgtgctggtatcacagaaatgtggcgctatgcccggtcgggcctgatgttccagagtctttgcagtgtggggaacttgtaaggatgagactacaagacatcgggccacatcgcctgccactacttaagtccgattcacttcggctttagctccaagcctttaatctcgcgaagctctttttttttttttaacaacataggagctgtgattggctgttttcagccaatcagcactgactcatttgcatagcctttacaagcggtcacaaactcaagaaacgagcggttttaatagtcttttagaatattgtttatcgaaccgaataaggaactgtgctttgtgattcacatatcagtggaggggtgtggaaatggcaccttgatctcaccctcatcgaaagtggagttgatgtccttccctggctcgctacagacgcacttccgcaatgatagggacttagggtgatagaagtgcaaagcatgactgtcaaatttttggagcaggttttctgacttcggtcggaaaacccctccacattttgtgtttaaaaatagaaatatttaagtgagatcagtttaaatctgctttatctagggtgtctaactgcttgcatctttttaacttttccttatttgtgagaaggtctgtaaaacttattatatgttagtacactgtagctgtcttcagacactccagaagagggattcagatcaccttacagatggttttgagccaccatgtggttgctgggatttgaactcaggacctttagaaaagtagttgggtgctcttacccgctgagccatctcaccagccctttttttttcttttttccagttcgggtttctctgtgtgtagccctggctgtcctggaactcattctgtagaccgggctggcctcgaactcagaaatctgcctgcctctgcctcccaagtgctgggattaaaggaatgtgccttcattgcccggctctagggctttttgttgttgtttgtttgtttgtttgtttgtttgcttttgtggatggcct

SEQ ID NO: 840 - DNA, 1087 bp, synthetic construct
  source 1..1087: mol_type = other DNA
tatttttaatgaagcagggccatggagcccaagctggccttgaacttctcagcttttgtgctggtatcacagaaatgtggcgctatgcccggtcgggcctgatgttccagagtctttgcagtgtggggaacttgtaaggatgagactacaagacatcgggccacatcgcctgccactacttaagtccgattcacttcggctttagctccaagcctttaatctcgcgaagctctttttttttttttaacaacataggagctgtgattggctgttttcagccaatcagcactgactcatttgcatagcctttacaagcggtcacaaactcaagaaacgagcggttttaatagtcttttagaatattgtttatcgaaccgaataaggaactgtgctttgtgattcacatatcagtggaggggtgtggaaatggcaccttgatctcaccctcatcgaaagtggagttgatgtccttccctggctcgctacagacgcacttccgcaatgatagggacttagggtgatagaagtgcaaagcatgactgtcaaatttttggagcaggttttctgacttcggtcggaaaacccctaaaaccagtaagggagaaaggtcaagtaacatataaaggaaggcctatcagaattacaccagacttttcaccagagactatgaaagccagaagagcctggacagatgttatacagacactaagagaacacaaatgccagcccaggctactatacctggccaaactctcaattaccatagatggagaaaccaaagtattccacgacaaaaacaaattcacacaatatctttccacgaatccagcccttcaaaggataatgacagaaaagaagcaatacaaggacggaaatcacgccctagaacaaccaagaaactaatcattcaacaaaccaaaaagaagacagccacaagaacagaatgccaactctaacaacaaaaataaaaggaagcaacaattacttttccttaatatctcttaatatcaatggactcaattccccaataaaaagacatagactaacagactggctacacaaacaggacccaacattctgctgctta

SEQ ID NO: 841 - DNA, 1087 bp, synthetic construct
  source 1..1087: mol_type = other DNA
tatttttaatgaagcagggccatggagcccaagctggccttgaacttctcagcttttgtgctggtatcacagaaatgtggcgctatgcccggtcgggcctgatgttccagagtctttgcagtgtggggaacttgtaaggatgagactacaagacatcgggccacatcgcctgccactacttaagtccgattcacttcggctttagctccaagcctttaatctcgcgaagctctttttttttttttaacaacataggagctgtgattggctgttttcagccaatcagcactgactcatttgcatagcctttacaagcggtcacaaactcaagaaacgagcggttttaatagtcttttagaatattgtttatcgaaccgaataaggaactgtgctttgtgattcacatatcagtggaggggtgtggaaatggcaccttgatctcaccctcatcgaaagtggagttgatgtccttccctggctcgctacagacgcacttccgcaatgatagggacttagggtgatagaagtgcaaagcatgactgtcaaatttttggagcaggttttctgacttcggtcggaaaacccctcccaatttcactggtctacaatgaaagcaaaacagttctcttccccgctccccggtgtgtgagaggggctttgatccttctctggtttcctaggaaacgcgtatgtgctagagccacgctctgagacttccgcctcgtgcggtcccgcttcctttctgcctcctctggcctgcatccgtgggggaggtggctggctgcagggttctccggatctcttctgtgttcccactactcaagcaccgagtggcgttctatggcgtccgcctcggctcagcccgcggccctgagcgcggagcaggccaagggtgaggaaagagcctagtctgggtgtgggccgtcttctggggggagggcgcgatactattctttgcctctccaagtggggcccttgcccattagggcgaagggttgggaggacaagcttatcgggttgcttgcaggcctcggcccactaattccctgcctcttccctcctctgggctcgcccgccgtcctccgcg

SEQ ID NO: 842 - DNA, 1087 bp, synthetic construct
  source 1..1087: mol_type = other DNA
tatttttaatgaagcagggccatggagcccaagctggccttgaacttctcagcttttgtgctggtatcacagaaatgtggcgctatgcccggtcgggcctgatgttccagagtctttgcagtgtggggaacttgtaaggatgagactacaagacatcgggccacatcgcctgccactacttaagtccgattcacttcggctttagctccaagcctttaatctcgcgaagctctttttttttttttaacaacataggagctgtgattggctgttttcagccaatcagcactgactcatttgcatagcctttacaagcggtcacaaactcaagaaacgagcggttttaatagtcttttagaatattgtttatcgaaccgaataaggaactgtgctttgtgattcacatatcagtggaggggtgtggaaatggcaccttgatctcaccctcatcgaaagtggagttgatgtccttccctggctcgctacagacgcacttccgcaatgatagggacttagggtgatagaagtgcaaagcatgactgtcaaatttttggagcaggttttctgacttcggtcggaaaacccctgaatttgttaaattacaggaggaagcttttttagttcattttacaaatactttcttgttaggtagataataccttctaaggttattatctggatcttctaagtctttttatcgctagcaagtctaagtttctggactttggaattagaagttaatgtcgtaggcgggcatggtggtccacgcctttaatcccagagtttgggaggcagacgcaggtggttttctgagttcgaggccatcctgctcttcaatgttagttccaggacagccagggttatacaaagaaaccctgtctcgagaaacaaaacaaacaaaaaaagagtagctgagtgctctgagttgtctctccagccccttagctatttattttcatttaaattatttttgttttattcgcttgtgtgcctgagtttgaatttcccgggattaacagttgaagactagggctggtgagatggctcagcggttaagattgccgactgctcttccaaaggtcctgag

SEQ ID NO: 843 - DNA, 1087 bp, synthetic construct
  source 1..1087: mol_type = other DNA
tatttttaatgaagcagggccatggagcccaagctggccttgaacttctcagcttttgtgctggtatcacagaaatgtggcgctatgcccggtcgggcctgatgttccagagtctttgcagtgtggggaacttgtaaggatgagactacaagacatcgggccacatcgcctgccactacttaagtccgattcacttcggctttagctccaagcctttaatctcgcgaagctctttttttttttttaacaacataggagctgtgattggctgttttcagccaatcagcactgactcatttgcatagcctttacaagcggtcacaaactcaagaaacgagcggttttaatagtcttttagaatattgtttatcgaaccgaataaggaactgtgctttgtgattcacatatcagtggaggggtgtggaaatggcaccttgatctcaccctcatcgaaagtggagttgatgtccttccctggctcgctacagacgcacttccgcaatgatagggacttagggtgatagaagtgcaaagcatgactgtcaaatttttggagcaggttttctgacttcggtcggaaaacccctaccccctaattctacaagaatagaaagcttagcagctcctctgaatggttgctctcaggtgctagtggttgcaagtcgtatgttgatgcctgcctttgccctacctggtgtgtgagcgtgagcgcgccccacctctccagcctctctcttactgtttttcagacaagatgggactgttgttctcctactgctatgtacctcaatttcaattgatcatgcctggacataactgcccatgttgtaaggtcgtctacgttgtaaggtcgtgctcagtttctgatgcctagactagtcacctttccgtttgcctcctgactgtgtaaatgaggcaaatgaaggtggtctcttaactgacatgttagtgtttgacctatgggatagtttctcattgttgagacagaatttctagaagctggtccgctgagcggctaagagcacttgctgatattgcaaaggatctacctgggtttggttctcagcactcacatggaagttcacat

SEQ ID NO: 844 - DNA, 654 bp, synthetic construct
  source 1..654: mol_type = other DNA
tatttttaatgaagcagggccatggagcccaagctggccttgaacttctcagcttttgtgctggtatcacagaaatgtggcgctatgcccggtcgggcctgatgttccagagtctttgcagtgtggggaacttgtaaggatgagactacaagacatcgggccacatcgcctgccactacttaagtccgattcacttcggctttagctccaagcctttaatctcgcgaagctctttttttttttttaacaacataggagctgtgattggctgttttcagccaatcagcactgactcatttgcatagcctttacaagcggtcacaaactcaagaaacgagcggttttaatagtcttttagaatattgtttatcgaaccgaataaggaactgtgctttgtgattcacatatcagtggaggggtgtggaaatggcaccttgatctcaccctcatcgaaagtggagttgatgtccttccctggctcgctacagacgcacttccgcaatgatagggacttagggtgatagaagtgcaaagcatgactgtcaaatttttggagcaggttttctgacttcggtcggaaaaccccttgtagttcctgcaatttaattttcgtttaaaactttattttattctttaacttaaaaaaaatatata

SEQ ID NO: 845 - DNA, 533 bp, synthetic construct; identical to SEQ ID NO: 365
  source 1..533: mol_type = other DNA

SEQ ID NO: 846 - DNA, 559 bp, synthetic construct; identical to SEQ ID NO: 366
  source 1..559: mol_type = other DNA

SEQ ID NO: 847 - DNA, 539 bp, synthetic construct; identical to SEQ ID NO: 367
  source 1..539: mol_type = other DNA

SEQ ID NO: 848 - DNA, 533 bp, synthetic construct; identical to SEQ ID NO: 368
  source 1..533: mol_type = other DNA

SEQ ID NO: 849 - DNA, 1087 bp, synthetic construct
  source 1..1087: mol_type = other DNA
gttctttgcttttacagaccgtctcctgtgtgtccctgtcagagacctgaattcggttcctagcacccatatgttagaacataacgtccaagttggaggctacaagtggcactaaattacacattatcagttttgacaggttggggcaccgtgtaaccctagtaacttagcgaaaggctcctcgaacccaacatcccacctctagctgggagcagctgttttgcaccagcgccgcctacctctccctccgcgtcggccagagcattcccagcaagcactgctctgatttgcatattgactcacggactttcctttactgctatacaaaaaacgacacaacagttctctttgtgaagagctttccctcagcccgagaagaatcgatagtttgccttttagcttcgacaatatacagttgaaagttggttagactttattttcacctttaccgtaagatgggtggaccgacaatgccactgtgcttccgaacgcgctcgagcaatgatagggacttagggtgatagaagtgcaaagcatgactgtcaaatttttggagcaggttttctgacttcggtcggaaaacccctactttctggagtttcaaaaacagactgtacgccaagggtcatatctttttttgtattggtttgtgtcttggttggtgtcttaggtgttaatcctacagtggagggtttatgggaataggaagtaacatgtcgcctgcatgtcataggagaaaaagcgagcatcagccgtatcggctttgtaacacaaattagctatcgtgaagtccgctcagctcttccctttctaccctggctgctttttgcagggattggtccgtggtctccagtctcttgggttctcaccctgtgtgaaaatcttcgtgtttttccctaccccccagtcacctcttacacagcctctgcttccaagcgcagcccccacaggagtttgtaggatttctgtgctagcggggaatgtgttctcacctcatagagccaggtagaaattatgcagatgggcagttctctgggaagaaagcagggcctttggggctctcagtgtccccgttgggttgtagaca

SEQ ID NO: 850 - DNA, 1087 bp, synthetic construct
  source 1..1087: mol_type = other DNA
gttctttgcttttacagaccgtctcctgtgtgtccctgtcagagacctgaattcggttcctagcacccatatgttagaacataacgtccaagttggaggctacaagtggcactaaattacacattatcagttttgacaggttggggcaccgtgtaaccctagtaacttagcgaaaggctcctcgaacccaacatcccacctctagctgggagcagctgttttgcaccagcgccgcctacctctccctccgcgtcggccagagcattcccagcaagcactgctctgatttgcatattgactcacggactttcctttactgctatacaaaaaacgacacaacagttctctttgtgaagagctttccctcagcccgagaagaatcgatagtttgccttttagcttcgacaatatacagttgaaagttggttagactttattttcacctttaccgtaagatgggtggaccgacaatgccactgtgcttccgaacgcgctcgagcaatgatagggacttagggtgatagaagtgcaaagcatgactgtcaaatttttggagcaggttttctgacttcggtcggaaaacccctactttctggagtttctaaaagtagactgtacgctaagggtcatatctttttttgttttggtttgtgtcttggttggcgtcttaaatgttaatcctacagtggagggctggcgaataggaagtaacatgtcgcctgcacgccataggagaaaaagcgagcatcagccgtatcggctttgtaacacaaattagctatcgtgaagtccgctcagctcttccctttctaccctggctgctttttgcagggattggtccgtggtctccagtctcttgggttctcaccctgtgtgaaaatcttcctgtttttccctaccccccaagtcacctcttacacagcctctgcttccaagcgcagcccccacaggagtttgtaggatttctgtgctagcggggagtgtgttctcacctcatagagccaggtagaaactacgcagatgggtgctgttctccaggaagaaagcagggcctttggggctctcagtgtccccgttgggttgtaga

SEQ ID NO: 851 - DNA, 1087 bp, synthetic construct
  source 1..1087: mol_type = other DNA
gttctttgcttttacagaccgtctcctgtgtgtccctgtcagagacctgaattcggttcctagcacccatatgttagaacataacgtccaagttggaggctacaagtggcactaaattacacattatcagttttgacaggttggggcaccgtgtaaccctagtaacttagcgaaaggctcctcgaacccaacatcccacctctagctgggagcagctgttttgcaccagcgccgcctacctctccctccgcgtcggccagagcattcccagcaagcactgctctgatttgcatattgactcacggactttcctttactgctatacaaaaaacgacacaacagttctctttgtgaagagctttccctcagcccgagaagaatcgatagtttgccttttagcttcgacaatatacagttgaaagttggttagactttattttcacctttaccgtaagatgggtggaccgacaatgccactgtgcttccgaacgcgctcgagcaatgatagggacttagggtgatagaagtgcaaagcatgactgtcaaatttttggagcaggttttctgacttcggtcggaaaacccctactttctggagtttcaaaaacagaccgtacgccaagggtcatgtcttttttcgtattggtttgtgtcttagttgttaatcctacagtggaggcctggggaataagaagtaacatgtggcctgcacgccataggagaaaaagcgagcatcagccgtatcggctttgtaacacaaattagctatcgtgaagtccgctcagctcttccatttctaccctggctgctttttgcagggattggtccgtggtctccagtctcttgggttctcaccctgtgtgaaaatcttcgtgtttttccctaccccccaagtcacctcttacacagcctctgcttccaagcgcagcccccacaggagtttgtaggatttctgtgctagcggggagtgtgttctcacctcatagagccaggtagaaattatgcagatgggcgctgttctctgggaagaaagcagggcctttggggctctcagtgtccccgttgggttgtagacataacactctta

SEQ ID NO: 852 - DNA, 891 bp, synthetic construct
  source 1..891: mol_type = other DNA
gttctttgcttttacagaccgtctcctgtgtgtccctgtcagagacctgaattcggttcctagcacccatatgttagaacataacgtccaagttggaggctacaagtggcactaaattacacattatcagttttgacaggttggggcaccgtgtaaccctagtaacttagcgaaaggctcctcgaacccaacatcccacctctagctgggagcagctgttttgcaccagcgccgcctacctctccctccgcgtcggccagagcattcccagcaagcactgctctgatttgcatattgactcacggactttcctttactgctatacaaaaaacgacacaacagttctctttgtgaagagctttccctcagcccgagaagaatcgatagtttgccttttagcttcgacaatatacagttgaaagttggttagactttattttcacctttaccgtaagatgggtggaccgacaatgccactgtgcttccgaacgcgctcgagcaatgatagggacttagggtgatagaagtgcaaagcatgactgtcaaatttttggagcaggttttctgacttcggtcggaaaacccctcctccggggatacaacgtgtttcctaaaagtagagggaggtaagagacggtagcacctgcggggcggcttgcacgccgagtgcctgtgacgcgccggcttaacttaactgcttccctgaagtaccttgaggttcctgatgtgcgggcggtagacggtaggcttatgcggcacgctgtcgtttccaccgtggctactgcgctttgggaaggccacgacctcctcctttggggaggtccttaggatctcagcttggcagtcgagtgggtggcgaccttttaaaggaatgggacccacccggagttc

SEQ ID NO: 853 - DNA, 1079 bp, synthetic construct
  source 1..1079: mol_type = other DNA
gttctttgcttttacagaccgtctcctgtgtgtccctgtcagagacctgaattcggttcctagcacccatatgttagaacataacgtccaagttggaggctacaagtggcactaaattacacattatcagttttgacaggttggggcaccgtgtaaccctagtaacttagcgaaaggctcctcgaacccaacatcccacctctagctgggagcagctgttttgcaccagcgccgcctacctctccctccgcgtcggccagagcattcccagcaagcactgctctgatttgcatattgactcacggactttcctttactgctatacaaaaaacgacacaacagttctctttgtgaagagctttccctcagcccgagaagaatcgatagtttgccttttagcttcgacaatatacagttgaaagttggttagactttattttcacctttaccgtaagatgggtggaccgacaatgccactgtgcttccgaacgcgctcgagcaatgatagggacttagggtgatagaagtgcaaagcatgactgtcaaatttttggagcaggttttctgacttcggtcggaaaacccctttcccttcttgtaatacaaaataataacaaccacagaggacatcgcaagtaaaatgtgtataacaaccccatctaaagaaccctatcatctttctactatctgtctacctaaatatgtatagtataaataaccctatatagcactctaagcaacttaagttaggtaacttagaaaactcttttttttttttgagactgagtctcactctgtcgcacccaggctggagtgcagtggcgtgatctcggctcactgcaacctccaccttctgggttcaagtgattctcccatctcagtctcccaagtagctgggattacaggcacgccaccatgccctgctacatttttttttttttagtagagatgaggtttcaccacattggccaggctgttctcgaactcctgacctcaggtgatccgcccaccttggcctcatgaagtgctgggattacaggtgtgagccactgtacccagccagaaaactcttaaaaaac

SEQ ID NO: 854 - DNA, 969 bp, synthetic construct
  source 1..969: mol_type = other DNA
gttctttgcttttacagaccgtctcctgtgtgtccctgtcagagacctgaattcggttcctagcacccatatgttagaacataacgtccaagttggaggctacaagtggcactaaattacacattatcagttttgacaggttggggcaccgtgtaaccctagtaacttagcgaaaggctcctcgaacccaacatcccacctctagctgggagcagctgttttgcaccagcgccgcctacctctccctccgcgtcggccagagcattcccagcaagcactgctctgatttgcatattgactcacggactttcctttactgctatacaaaaaacgacacaacagttctctttgtgaagagctttccctcagcccgagaagaatcgatagtttgccttttagcttcgacaatatacagttgaaagttggttagactttattttcacctttaccgtaagatgggtggaccgacaatgccactgtgcttccgaacgcgctcgagcaatgatagggacttagggtgatagaagtgcaaagcatgactgtcaaatttttggagcaggttttctgacttcggtcggaaaacccctctgaattttcttgcagttgaacaacagaggctttttttgtgtgtgtgggggtgcttggttttgggaggttgaagagtacttgttcgcaaactctctaaatgagagatggggaagtgtcttaccagctgattcgcgagagcacctgcaagtttacctgttttagtgatttgcgtttatgaaagttggagttgctgattttgtgatctctacttttaaggtaaaagcagggcggtgttgacttttcttgccagttggctgtcctgttttctttctcgcactgttttctttttgagacgaagtctgtcgctcaggctggagtgcactggcgtgatctcggctcgctgcaaactttgccgaacccctgtttagcgatttccgtttg

SEQ ID NO: 855 - DNA, 1087 bp, synthetic construct
  source 1..1087: mol_type = other DNA
gttctttgcttttacagaccgtctcctgtgtgtccctgtcagagacctgaattcggttcctagcacccatatgttagaacataacgtccaagttggaggctacaagtggcactaaattacacattatcagttttgacaggttggggcaccgtgtaaccctagtaacttagcgaaaggctcctcgaacccaacatcccacctctagctgggagcagctgttttgcaccagcgccgcctacctctccctccgcgtcggccagagcattcccagcaagcactgctctgatttgcatattgactcacggactttcctttactgctatacaaaaaacgacacaacagttctctttgtgaagagctttccctcagcccgagaagaatcgatagtttgccttttagcttcgacaatatacagttgaaagttggttagactttattttcacctttaccgtaagatgggtggaccgacaatgccactgtgcttccgaacgcgctcgagcaatgatagggacttagggtgatagaagtgcaaagcatgactgtcaaatttttggagcaggttttctgacttcggtcggaaaacccctatatgtggtaatccaacaatagaaattatttttaagtttgtgtgttcctttttctgttcaatggtgcttttgatattgttgtaaagcagtgactagcagattctgtgtggtaaaagcactgaaccctgtttagttcttttctccctaccttattggtaattatttctgtgtatatatgttccaaagaaatgcggcttgtatattcatgcttttcaactttttgtgatagacagttgatacacaagtagtacctcctccgggatcttcttagtcaagactgtttggtagatgcatgttttttgttacttgtaatgtacagtattcagttcattttctttttgcagcactgtccggttgaaacacaacgcgaggatcgggcgtggtggctcacgcctgtaatcccagcactttgggaggccgaggcaggacaatcaagaccaatcctggtcatcaaggcaggagaatcaagaccatcgaggtcaggagatcaagaccatcct

SEQ ID NO: 856 - DNA, 1085 bp, synthetic construct
  source 1..1085: mol_type = other DNA
gttctttgcttttacagaccgtctcctgtgtgtccctgtcagagacctgaattcggttcctagcacccatatgttagaacataacgtccaagttggaggctacaagtggcactaaattacacattatcagttttgacaggttggggcaccgtgtaaccctagtaacttagcgaaaggctcctcgaacccaacatcccacctctagctgggagcagctgttttgcaccagcgccgcctacctctccctccgcgtcggccagagcattcccagcaagcactgctctgatttgcatattgactcacggactttcctttactgctatacaaaaaacgacacaacagttctctttgtgaagagctttccctcagcccgagaagaatcgatagtttgccttttagcttcgacaatatacagttgaaagttggttagactttattttcacctttaccgtaagatgggtggaccgacaatgccactgtgcttccgaacgcgctcgagcaatgatagggacttagggtgatagaagtgcaaagcatgactgtcaaatttttggagcaggttttctgacttcggtcggaaaacccctacatcaggttgtttttctgtttttacatcaggttgtttttctgtttggttttttttttacaccacgtttatacgccggtgcacggtttaccactgaaaacacctttcatctacaggtgatatcttttaacacaaataaaatgtagtagtcctaggagacggaatagaaggaggtggggcctaggcagattcatctctgcggtgcattttgcctctggccctcgggccctagtttgcgatctttcccatcttgcctctgcttccctctgcacaatcctgagtattgcagtaccttacacttaaggaaatttcgtcttgccaaagttgatccatttcagctccgaaacataacaggaactagtgcaacgataaacgtatgaggaacttgcaataagagtgacagaatcctttgaatcaaaaaaaaaaaaagccaccacttaatgagtatctaccatatgtcaagggcttcaccaatatttcattgaaatattccagacca

SEQ ID NO: 857 - DNA, 1087 bp, synthetic construct
  source 1..1087: mol_type = other DNA
gttctttgcttttacagaccgtctcctgtgtgtccctgtcagagacctgaattcggttcctagcacccatatgttagaacataacgtccaagttggaggctacaagtggcactaaattacacattatcagttttgacaggttggggcaccgtgtaaccctagtaacttagcgaaaggctcctcgaacccaacatcccacctctagctgggagcagctgttttgcaccagcgccgcctacctctccctccgcgtcggccagagcattcccagcaagcactgctctgatttgcatattgactcacggactttcctttactgctatacaaaaaacgacacaacagttctctttgtgaagagctttccctcagcccgagaagaatcgatagtttgccttttagcttcgacaatatacagttgaaagttggttagactttattttcacctttaccgtaagatgggtggaccgacaatgccactgtgcttccgaacgcgctcgagcaatgatagggacttagggtgatagaagtgcaaagcatgactgtcaaatttttggagcaggttttctgacttcggtcggaaaacccctcttatgatgtttgttgccaatgatagattgttttcactgtgcaaaaattatgggtagttttggtggtcttgatgcagttgtaagcttggggtatgaaggtttgggccacgcctgggcgcttccggctgcgccggatgctgtttcctttccgctcccaggggcgttgggaacggttgtaggacgtggctctttattcgtgagttttccatttacctccgctgaacctagagcttcagacgccctatggcgtccgcctcgacccaaccggcggccttgagcgctgagcaagcaaagggtgagaatcgtcctagtcaaggcataggctgctggcctggggtagtcaaggcatgggctgctggtctggggaggatgcgggcggaggatgtggggcgacaaacctggctacgtccgccgggaaaatggggtaggggacgccgggtaccgtccttctaagtggggcgcttgcccccaagacttgggatcttattgggttacctaca

SEQ ID NO: 858 - DNA, 1085 bp, synthetic construct
  source 1..1085: mol_type = other DNA
gttctttgcttttacagaccgtctcctgtgtgtccctgtcagagacctgaattcggttcctagcacccatatgttagaacataacgtccaagttggaggctacaagtggcactaaattacacattatcagttttgacaggttggggcaccgtgtaaccctagtaacttagcgaaaggctcctcgaacccaacatcccacctctagctgggagcagctgttttgcaccagcgccgcctacctctccctccgcgtcggccagagcattcccagcaagcactgctctgatttgcatattgactcacggactttcctttactgctatacaaaaaacgacacaacagttctctttgtgaagagctttccctcagcccgagaagaatcgatagtttgccttttagcttcgacaatatacagttgaaagttggttagactttattttcacctttaccgtaagatgggtggaccgacaatgccactgtgcttccgaacgcgctcgagcaatgatagggacttagggtgatagaagtgcaaagcatgactgtcaaatttttggagcaggttttctgacttcggtcggaaaaccccttctttactgttatatgttaggcgaaatattacgcgtttggagtaagtggtgctttttgtaactgaaaagagattctgtgtgtgtttttttttttttagaggctgcatagttatttgtatgaaccgcaggtgacctaattagcaaggtaattcagacctgtatcctagcacttaagaagtggaagtgggataaccctgcgtgttctcgtgtgggaggctagcttaagcaacaaagcaggaaggccccaccaacaaaagaatttaaaaattatacgtgcgtggtggcgcgcgtatgaggaaattatttggcaactgtgttacagtatagcagcaaatggaatagacctagtccctgactttaggagacctgcctcagccccccgaatggctgggactacaggcgtgcgcctccgcgcccagctaatttttgcatttttggtagagacgggttcaccatgttggccaggatggtctccatctcttcatctggtgatccgcc

SEQ ID NO: 859 - DNA, 1087 bp, synthetic construct
  source 1..1087: mol_type = other DNA
gttctttgcttttacagaccgtctcctgtgtgtccctgtcagagacctgaattcggttcctagcacccatatgttagaacataacgtccaagttggaggctacaagtggcactaaattacacattatcagttttgacaggttggggcaccgtgtaaccctagtaacttagcgaaaggctcctcgaacccaacatcccacctctagctgggagcagctgttttgcaccagcgccgcctacctctccctccgcgtcggccagagcattcccagcaagcactgctctgatttgcatattgactcacggactttcctttactgctatacaaaaaacgacacaacagttctctttgtgaagagctttccctcagcccgagaagaatcgatagtttgccttttagcttcgacaatatacagttgaaagttggttagactttattttcacctttaccgtaagatgggtggaccgacaatgccactgtgcttccgaacgcgctcgagcaatgatagggacttagggtgatagaagtgcaaagcatgactgtcaaatttttggagcaggttttctgacttcggtcggaaaacccctaccttattcacgcctaaaaagtagactgactgtggggtggtcgtgttttttgtttcttgttggtaggtggtgaatgcgtttttttcgttgttttctccgttactcaggctgccagttgcttggcagtcttgtcgctggctgtggacgctctgcacttcatcaccgtccccagctgcgctttgagccggtctaaggttgcccacagtattgacgttgggacccacgaaactggcaatttccatgtgtgcggccttacccagttctcccaaacttctgcgtataaccgcttctctgtgcttcagaaagataagtccggccccggcctcacacagcagctcagttcgtgacagcgtttaatatgtaaaatggagcaaataatttatagggcgttgggagagttaaagagactaattcatttacgtgttaaatacagggaatggcttttgcattgatataaccccagcctccagcatgcgccagacctgacgtaggtgttcggc

SEQ ID NO: 860 - DNA, 1087 bp, synthetic construct
  source 1..1087: mol_type = other DNA
gttctttgcttttacagaccgtctcctgtgtgtccctgtcagagacctgaattcggttcctagcacccatatgttagaacataacgtccaagttggaggctacaagtggcactaaattacacattatcagttttgacaggttggggcaccgtgtaaccctagtaacttagcgaaaggctcctcgaacccaacatcccacctctagctgggagcagctgttttgcaccagcgccgcctacctctccctccgcgtcggccagagcattcccagcaagcactgctctgatttgcatattgactcacggactttcctttactgctatacaaaaaacgacacaacagttctctttgtgaagagctttccctcagcccgagaagaatcgatagtttgccttttagcttcgacaatatacagttgaaagttggttagactttattttcacctttaccgtaagatgggtggaccgacaatgccactgtgcttccgaacgcgctcgagcaatgatagggacttagggtgatagaagtgcaaagcatgactgtcaaatttttggagcaggttttctgacttcggtcggaaaaccccttttgacccattacccatctaagttagatgcttttttaaatgttttttaatttttaaatttttaatttttttcattatttattttttatttttgagacggatctcggctcactgtaacctccacctcccgggttcaagcgattctcctgactcagcctcccgagtagctgggattacaggcgcgcgccaccatgcccggctaatttttctatttttagtaaagacggggtttcgccatgttgaccagggtggtcttgaactcctgacgtcaggtgatcctcctgcctcgtgctgggattgcaggcgtgagccaccgctcccggcccttagatgctttttaatcagcaagtacgcaatgctttcctgacaggaatgtcaagtccgtcaggaaatccacataagggtgttaagcaggcaaagtaccacatacagattaaaatcaaaagcactgtcaacgcttatttaatttatacagtagaccctaacttttctaattttgtg

SEQ ID NO: 861 - DNA, 1087 bp, synthetic construct
  source 1..1087: mol_type = other DNA
gttctttgcttttacagaccgtctcctgtgtgtccctgtcagagacctgaattcggttcctagcacccatatgttagaacataacgtccaagttggaggctacaagtggcactaaattacacattatcagttttgacaggttggggcaccgtgtaaccctagtaacttagcgaaaggctcctcgaacccaacatcccacctctagctgggagcagctgttttgcaccagcgccgcctacctctccctccgcgtcggccagagcattcccagcaagcactgctctgatttgcatattgactcacggactttcctttactgctatacaaaaaacgacacaacagttctctttgtgaagagctttccctcagcccgagaagaatcgatagtttgccttttagcttcgacaatatacagttgaaagttggttagactttattttcacctttaccgtaagatgggtggaccgacaatgccactgtgcttccgaacgcgctcgagcaatgatagggacttagggtgatagaagtgcaaagcatgactgtcaaatttttggagcaggttttctgacttcggtcggaaaacccctgtttacttggttttaaaaatagcttgcactagcgataccgcgaatatggttattaggtttgttaggcacagtcgtgtcttactatagaaaaataacgtagtgttcattttgctgcctgtatgtgttaatttgtccttattgcgccattgttcttgttaagtcttctgtaaggagttgcgggtttcaaactgtcagtctgagagcataagctcacttttcagtcagttgaattgaatgttacattcgattggttctggatattgatattacccaaggcttgtcctgtttgtaagtcttttcctacacctgacaatatgattatgtttacaatgtccctagaactctgggtgtatcgttcccactgaataaaatttgatctctaagttgacctataaatttaagtaccaaaaaactggtttgtaagattttggaaggcagaggcagggaagagaccaacgtggtctacatataaagtaccaggtacatataaagtaccaggt

SEQ ID NO: 862 - DNA, 1083 bp, synthetic construct
  source 1..1083: mol_type = other DNA
gttctttgcttttacagaccgtctcctgtgtgtccctgtcagagacctgaattcggttcctagcacccatatgttagaacataacgtccaagttggaggctacaagtggcactaaattacacattatcagttttgacaggttggggcaccgtgtaaccctagtaacttagcgaaaggctcctcgaacccaacatcccacctctagctgggagcagctgttttgcaccagcgccgcctacctctccctccgcgtcggccagagcattcccagcaagcactgctctgatttgcatattgactcacggactttcctttactgctatacaaaaaacgacacaacagttctctttgtgaagagctttccctcagcccgagaagaatcgatagtttgccttttagcttcgacaatatacagttgaaagttggttagactttattttcacctttaccgtaagatgggtggaccgacaatgccactgtgcttccgaacgcgctcgagcaatgatagggacttagggtgatagaagtgcaaagcatgactgtcaaatttttggagcaggttttctgacttcggtcggaaaacccctatttttgtggtgctaaaagttagattgcattccgcccttctcacgtctctttacgtgttgtttgcgaggcgtggcctcggaggtaaatggtctccttttacctcagataagcttacctttgctctgtgagtaagaatgtagctacacttccaaatttagctattgtcctttgcggtccaaatgaaaatattaccttccgatctaacaatgttaaactagtcccaggcccttctatcgattgccagaatagactagactactacacagacacaccctctcaaatcaggccagctcctgcaacctgcacctacagtttgtcccctgggacaaatgaaaggacaggccctctttcccccccccccccaaatcagagcacacacagatcttggggtctggggcagaaatttcgttcatggaaaaaacaaacaaacaaacaaacacgatcaaaggaagctcgttccctttggcctcagggtttcttagacgccgtgttccc

SEQ ID NO: 863 - DNA, 1084 bp, synthetic construct
  source 1..1084: mol_type = other DNA
gttctttgcttttacagaccgtctcctgtgtgtccctgtcagagacctgaattcggttcctagcacccatatgttagaacataacgtccaagttggaggctacaagtggcactaaattacacattatcagttttgacaggttggggcaccgtgtaaccctagtaacttagcgaaaggctcctcgaacccaacatcccacctctagctgggagcagctgttttgcaccagcgccgcctacctctccctccgcgtcggccagagcattcccagcaagcactgctctgatttgcatattgactcacggactttcctttactgctatacaaaaaacgacacaacagttctctttgtgaagagctttccctcagcccgagaagaatcgatagtttgccttttagcttcgacaatatacagttgaaagttggttagactttattttcacctttaccgtaagatgggtggaccgacaatgccactgtgcttccgaacgcgctcgagcaatgatagggacttagggtgatagaagtgcaaagcatgactgtcaaatttttggagcaggttttctgacttcggtcggaaaacccctataactggtaaccaaaagcagattactttcccccttgtggtcttcgcgtttgcggacgggagagaactttcggccattttccttttagaaatttaacttcttgaaggccaccaggtgacccttacttccctctcacctttccttctacctgtactttctctattaaaaagcctgcagaagtacccttgacaaattgccaaaaatgacacctaaaaaaaaaaaaaggaaaaacgacaccttaggtaattataggttgtaagaaaaagatttgacctcttggagtttttatttcttaataccaaaggacacccaaggaacgtatctctcaaaattgggtttcaaacctcagccgtttccttcttagttccagtgcttaacacgcaacagacctgcacaccactacactgcatacgagttttaaagttaataaatcagtcacccctccatagtcttctacctacttgaagacagaaacggctgctaggaagcaattcttc

SEQ ID NO: 864 - DNA, 1087 bp, synthetic construct
  source 1..1087: mol_type = other DNA
gttctttgcttttacagaccgtctcctgtgtgtccctgtcagagacctgaattcggttcctagcacccatatgttagaacataacgtccaagttggaggctacaagtggcactaaattacacattatcagttttgacaggttggggcaccgtgtaaccctagtaacttagcgaaaggctcctcgaacccaacatcccacctctagctgggagcagctgttttgcaccagcgccgcctacctctccctccgcgtcggccagagcattcccagcaagcactgctctgatttgcatattgactcacggactttcctttactgctatacaaaaaacgacacaacagttctctttgtgaagagctttccctcagcccgagaagaatcgatagtttgccttttagcttcgacaatatacagttgaaagttggttagactttattttcacctttaccgtaagatgggtggaccgacaatgccactgtgcttccgaacgcgctcgagcaatgatagggacttagggtgatagaagtgcaaagcatgactgtcaaatttttggagcaggttttctgacttcggtcggaaaacccctctggggaataagagtggtttaaagaaagaacaatttgagagatctgcttagatctaataaaacccaagtatagtttctttagacgtcttatatctcacgtaggacctcttatttcagactcactgcaagaacaagctaaagaactatatacagtcaggaacaaggtgagccatcgcggttctcagtcccatgatcttaagagtttttcctcttcccctcttccctggctgtcctggagctcactctgtagaccaggctggtctcaaactcagaaatccacttacctctgcctcccaagggctgggattaaaggcatgcaccaccattgcccggcagggtatgtggactatgctgtccttcaactcagagatcgtggtactttaaatctcattttccgaaagaaaagaaaagaaaggaaggggggaaataaagccagtatattttgcacccacaatctgaagttctacaaatattgttagaaaatgcaaaggacccaagtc

SEQ ID NO: 865 - DNA, 1087 bp, synthetic construct
  source 1..1087: mol_type = other DNA
gttctttgcttttacagaccgtctcctgtgtgtccctgtcagagacctgaattcggttcctagcacccatatgttagaacataacgtccaagttggaggctacaagtggcactaaattacacattatcagttttgacaggttggggcaccgtgtaaccctagtaacttagcgaaaggctcctcgaacccaacatcccacctctagctgggagcagctgttttgcaccagcgccgcctacctctccctccgcgtcggccagagcattcccagcaagcactgctctgatttgcatattgactcacggactttcctttactgctatacaaaaaacgacacaacagttctctttgtgaagagctttccctcagcccgagaagaatcgatagtttgccttttagcttcgacaatatacagttgaaagttggttagactttattttcacctttaccgtaagatgggtggaccgacaatgccactgtgcttccgaacgcgctcgagcaatgatagggacttagggtgatagaagtgcaaagcatgactgtcaaatttttggagcaggttttctgacttcggtcggaaaacccctctcggtttatcttaaagggttttaaatatagaaagcttccttagtcttatgggtgagagtgctgtttaagccttacctaggtatgtctttgaacatttattacagattgttatttgtgactatgaccactcaggtgttctgttcttgtgaatttagacacactcagaaaggctacacactcaaagaccacaccaaagtgaagtactatctgggccgtgaaactggtcacatatcagttattttgcagtaaaacaaggaagtcaatcatactgcttcagtgggtcagggagtcaagaatgcacagtacaagagctggtgagattcctcagcaggtaagagcactgaatgctcttccaaagattctgagttcaaatcccagcaaccacgtggtggatttgaacaaaggatgaaaacaaccatccataaccagatctgatgccctcttctggagtgtcaaaagacagctatggtgtacttacataaataaataagtaaaaaca

SEQ ID NO: 866 - DNA, 1087 bp, synthetic construct
  source 1..1087: mol_type = other DNA
gttctttgcttttacagaccgtctcctgtgtgtccctgtcagagacctgaattcggttcctagcacccatatgttagaacataacgtccaagttggaggctacaagtggcactaaattacacattatcagttttgacaggttggggcaccgtgtaaccctagtaacttagcgaaaggctcctcgaacccaacatcccacctctagctgggagcagctgttttgcaccagcgccgcctacctctccctccgcgtcggccagagcattcccagcaagcactgctctgatttgcatattgactcacggactttcctttactgctatacaaaaaacgacacaacagttctctttgtgaagagctttccctcagcccgagaagaatcgatagtttgccttttagcttcgacaatatacagttgaaagttggttagactttattttcacctttaccgtaagatgggtggaccgacaatgccactgtgcttccgaacgcgctcgagcaatgatagggacttagggtgatagaagtgcaaagcatgactgtcaaatttttggagcaggttttctgacttcggtcggaaaacccctccacattttgtgtttaaaaatagaaatatttaagtgagatcagtttaaatctgctttatctagggtgtctaactgcttgcatctttttaacttttccttatttgtgagaaggtctgtaaaacttattatatgttagtacactgtagctgtcttcagacactccagaagagggattcagatcaccttacagatggttttgagccaccatgtggttgctgggatttgaactcaggacctttagaaaagtagttgggtgctcttacccgctgagccatctcaccagccctttttttttcttttttccagttcgggtttctctgtgtgtagccctggctgtcctggaactcattctgtagaccgggctggcctcgaactcagaaatctgcctgcctctgcctcccaagtgctgggattaaaggaatgtgccttcattgcccggctctagggctttttgttgttgtttgtttgtttgtttgtttgtttgcttttgtggatggcct

SEQ ID NO: 867 - DNA, 1087 bp, synthetic construct
  source 1..1087: mol_type = other DNA
gttctttgcttttacagaccgtctcctgtgtgtccctgtcagagacctgaattcggttcctagcacccatatgttagaacataacgtccaagttggaggctacaagtggcactaaattacacattatcagttttgacaggttggggcaccgtgtaaccctagtaacttagcgaaaggctcctcgaacccaacatcccacctctagctgggagcagctgttttgcaccagcgccgcctacctctccctccgcgtcggccagagcattcccagcaagcactgctctgatttgcatattgactcacggactttcctttactgctatacaaaaaacgacacaacagttctctttgtgaagagctttccctcagcccgagaagaatcgatagtttgccttttagcttcgacaatatacagttgaaagttggttagactttattttcacctttaccgtaagatgggtggaccgacaatgccactgtgcttccgaacgcgctcgagcaatgatagggacttagggtgatagaagtgcaaagcatgactgtcaaatttttggagcaggttttctgacttcggtcggaaaacccctaaaaccagtaagggagaaaggtcaagtaacatataaaggaaggcctatcagaattacaccagacttttcaccagagactatgaaagccagaagagcctggacagatgttatacagacactaagagaacacaaatgccagcccaggctactatacctggccaaactctcaattaccatagatggagaaaccaaagtattccacgacaaaaacaaattcacacaatatctttccacgaatccagcccttcaaaggataatgacagaaaagaagcaatacaaggacggaaatcacgccctagaacaaccaagaaactaatcattcaacaaaccaaaaagaagacagccacaagaacagaatgccaactctaacaacaaaaataaaaggaagcaacaattacttttccttaatatctcttaatatcaatggactcaattccccaataaaaagacatagactaacagactggctacacaaacaggacccaacattctgctgctta

SEQ ID NO: 868 - DNA, 1087 bp, synthetic construct
  source 1..1087: mol_type = other DNA
gttctttgcttttacagaccgtctcctgtgtgtccctgtcagagacctgaattcggttcctagcacccatatgttagaacataacgtccaagttggaggctacaagtggcactaaattacacattatcagttttgacaggttggggcaccgtgtaaccctagtaacttagcgaaaggctcctcgaacccaacatcccacctctagctgggagcagctgttttgcaccagcgccgcctacctctccctccgcgtcggccagagcattcccagcaagcactgctctgatttgcatattgactcacggactttcctttactgctatacaaaaaacgacacaacagttctctttgtgaagagctttccctcagcccgagaagaatcgatagtttgccttttagcttcgacaatatacagttgaaagttggttagactttattttcacctttaccgtaagatgggtggaccgacaatgccactgtgcttccgaacgcgctcgagcaatgatagggacttagggtgatagaagtgcaaagcatgactgtcaaatttttggagcaggttttctgacttcggtcggaaaacccctcccaatttcactggtctacaatgaaagcaaaacagttctcttccccgctccccggtgtgtgagaggggctttgatccttctctggtttcctaggaaacgcgtatgtgctagagccacgctctgagacttccgcctcgtgcggtcccgcttcctttctgcctcctctggcctgcatccgtgggggaggtggctggctgcagggttctccggatctcttctgtgttcccactactcaagcaccgagtggcgttctatggcgtccgcctcggctcagcccgcggccctgagcgcggagcaggccaagggtgaggaaagagcctagtctgggtgtgggccgtcttctggggggagggcgcgatactattctttgcctctccaagtggggcccttgcccattagggcgaagggttgggaggacaagcttatcgggttgcttgcaggcctcggcccactaattccctgcctcttccctcctctgggctcgcccgccgtcctccgcg

SEQ ID NO: 869 - DNA, 1087 bp, synthetic construct
  source 1..1087: mol_type = other DNA
gttctttgcttttacagaccgtctcctgtgtgtccctgtcagagacctgaattcggttcctagcacccatatgttagaacataacgtccaagttggaggctacaagtggcactaaattacacattatcagttttgacaggttggggcaccgtgtaaccctagtaacttagcgaaaggctcctcgaacccaacatcccacctctagctgggagcagctgttttgcaccagcgccgcctacctctccctccgcgtcggccagagcattcccagcaagcactgctctgatttgcatattgactcacggactttcctttactgctatacaaaaaacgacacaacagttctctttgtgaagagctttccctcagcccgagaagaatcgatagtttgccttttagcttcgacaatatacagttgaaagttggttagactttattttcacctttaccgtaagatgggtggaccgacaatgccactgtgcttccgaacgcgctcgagcaatgatagggacttagggtgatagaagtgcaaagcatgactgtcaaatttttggagcaggttttctgacttcggtcggaaaacccctgaatttgttaaattacaggaggaagcttttttagttcattttacaaatactttcttgttaggtagataataccttctaaggttattatctggatcttctaagtctttttatcgctagcaagtctaagtttctggactttggaattagaagttaatgtcgtaggcgggcatggtggtccacgcctttaatcccagagtttgggaggcagacgcaggtggttttctgagttcgaggccatcctgctcttcaatgttagttccaggacagccagggttatacaaagaaaccctgtctcgagaaacaaaacaaacaaaaaaagagtagctgagtgctctgagttgtctctccagccccttagctatttattttcatttaaattatttttgttttattcgcttgtgtgcctgagtttgaatttcccgggattaacagttgaagactagggctggtgagatggctcagcggttaagattgccgactgctcttccaaaggtcctgag

SEQ ID NO: 870 - DNA, 1087 bp, synthetic construct
  source 1..1087: mol_type = other DNA
gttctttgcttttacagaccgtctcctgtgtgtccctgtcagagacctgaattcggttcctagcacccatatgttagaacataacgtccaagttggaggctacaagtggcactaaattacacattatcagttttgacaggttggggcaccgtgtaaccctagtaacttagcgaaaggctcctcgaacccaacatcccacctctagctgggagcagctgttttgcaccagcgccgcctacctctccctccgcgtcggccagagcattcccagcaagcactgctctgatttgcatattgactcacggactttcctttactgctatacaaaaaacgacacaacagttctctttgtgaagagctttccctcagcccgagaagaatcgatagtttgccttttagcttcgacaatatacagttgaaagttggttagactttattttcacctttaccgtaagatgggtggaccgacaatgccactgtgcttccgaacgcgctcgagcaatgatagggacttagggtgatagaagtgcaaagcatgactgtcaaatttttggagcaggttttctgacttcggtcggaaaacccctaccccctaattctacaagaatagaaagcttagcagctcctctgaatggttgctctcaggtgctagtggttgcaagtcgtatgttgatgcctgcctttgccctacctggtgtgtgagcgtgagcgcgccccacctctccagcctctctcttactgtttttcagacaagatgggactgttgttctcctactgctatgtacctcaatttcaattgatcatgcctggacataactgcccatgttgtaaggtcgtctacgttgtaaggtcgtgctcagtttctgatgcctagactagtcacctttccgtttgcctcctgactgtgtaaatgaggcaaatgaaggtggtctcttaactgacatgttagtgtttgacctatgggatagtttctcattgttgagacagaatttctagaagctggtccgctgagcggctaagagcacttgctgatattgcaaaggatctacctgggtttggttctcagcactcacatggaagttcacat

SEQ ID NO: 871 - DNA, 654 bp, synthetic construct
  source 1..654: mol_type = other DNA
gttctttgcttttacagaccgtctcctgtgtgtccctgtcagagacctgaattcggttcctagcacccatatgttagaacataacgtccaagttggaggctacaagtggcactaaattacacattatcagttttgacaggttggggcaccgtgtaaccctagtaacttagcgaaaggctcctcgaacccaacatcccacctctagctgggagcagctgttttgcaccagcgccgcctacctctccctccgcgtcggccagagcattcccagcaagcactgctctgatttgcatattgactcacggactttcctttactgctatacaaaaaacgacacaacagttctctttgtgaagagctttccctcagcccgagaagaatcgatagtttgccttttagcttcgacaatatacagttgaaagttggttagactttattttcacctttaccgtaagatgggtggaccgacaatgccactgtgcttccgaacgcgctcgagcaatgatagggacttagggtgatagaagtgcaaagcatgactgtcaaatttttggagcaggttttctgacttcggtcggaaaaccccttgtagttcctgcaatttaattttcgtttaaaactttattttattctttaacttaaaaaaaatatata

SEQ ID NO: 872 - DNA, 1087 bp, synthetic construct
  source 1..1087: mol_type = other DNA
gaagcagcgaggcccctacgagcctcgaggaaaagggaaagggccgctcaccgtcccttggccgccgtcccgcgcttccggatgagctcgtccagcgagagatcggccatcttgcggcgcgcagctagcggagaacggaggagaagccgactgcggcgagcccgccccgcggccggagtcaagagcggcttccggcaacccggacggccaactctcgcgacagctcaaacgaaaagctcgagacggaaggggtggagcctctctccccgtgagcctttgcggtgctcgcttctaatttgcatggaggagtccggagccttatgggctctctctcccccctcctccttttgctaatgaggaattagaattatatcgatcataaaccattaaaaagcattatcaagaggacaagtcttttagtcatacagccgatcggacactcaccatacttgtaatgagaatataatttcttacccctgaggaacgtagacacgttcctcaatgatagggacttagggtgatagaagtgcaaagcatgactgtcaaatttttggagcaggttttctgacttcggtcggaaaacccctactttctggagtttcaaaaacagactgtacgccaagggtcatatctttttttgtattggtttgtgtcttggttggtgtcttaggtgttaatcctacagtggagggtttatgggaataggaagtaacatgtcgcctgcatgtcataggagaaaaagcgagcatcagccgtatcggctttgtaacacaaattagctatcgtgaagtccgctcagctcttccctttctaccctggctgctttttgcagggattggtccgtggtctccagtctcttgggttctcaccctgtgtgaaaatcttcgtgtttttccctaccccccagtcacctcttacacagcctctgcttccaagcgcagcccccacaggagtttgtaggatttctgtgctagcggggaatgtgttctcacctcatagagccaggtagaaattatgcagatgggcagttctctgggaagaaagcagggcctttggggctctcagtgtccccgttgggttgtagaca

SEQ ID NO: 873 - DNA, 1087 bp, synthetic construct
  source 1..1087: mol_type = other DNA
gaagcagcgaggcccctacgagcctcgaggaaaagggaaagggccgctcaccgtcccttggccgccgtcccgcgcttccggatgagctcgtccagcgagagatcggccatcttgcggcgcgcagctagcggagaacggaggagaagccgactgcggcgagcccgccccgcggccggagtcaagagcggcttccggcaacccggacggccaactctcgcgacagctcaaacgaaaagctcgagacggaaggggtggagcctctctccccgtgagcctttgcggtgctcgcttctaatttgcatggaggagtccggagccttatgggctctctctcccccctcctccttttgctaatgaggaattagaattatatcgatcataaaccattaaaaagcattatcaagaggacaagtcttttagtcatacagccgatcggacactcaccatacttgtaatgagaatataatttcttacccctgaggaacgtagacacgttcctcaatgatagggacttagggtgatagaagtgcaaagcatgactgtcaaatttttggagcaggttttctgacttcggtcggaaaacccctactttctggagtttctaaaagtagactgtacgctaagggtcatatctttttttgttttggtttgtgtcttggttggcgtcttaaatgttaatcctacagtggagggctggcgaataggaagtaacatgtcgcctgcacgccataggagaaaaagcgagcatcagccgtatcggctttgtaacacaaattagctatcgtgaagtccgctcagctcttccctttctaccctggctgctttttgcagggattggtccgtggtctccagtctcttgggttctcaccctgtgtgaaaatcttcctgtttttccctaccccccaagtcacctcttacacagcctctgcttccaagcgcagcccccacaggagtttgtaggatttctgtgctagcggggagtgtgttctcacctcatagagccaggtagaaactacgcagatgggtgctgttctccaggaagaaagcagggcctttggggctctcagtgtccccgttgggttgtaga

SEQ ID NO: 874 - DNA, 1087 bp, synthetic construct
  source 1..1087: mol_type = other DNA
gaagcagcgaggcccctacgagcctcgaggaaaagggaaagggccgctcaccgtcccttggccgccgtcccgcgcttccggatgagctcgtccagcgagagatcggccatcttgcggcgcgcagctagcggagaacggaggagaagccgactgcggcgagcccgccccgcggccggagtcaagagcggcttccggcaacccggacggccaactctcgcgacagctcaaacgaaaagctcgagacggaaggggtggagcctctctccccgtgagcctttgcggtgctcgcttctaatttgcatggaggagtccggagccttatgggctctctctcccccctcctccttttgctaatgaggaattagaattatatcgatcataaaccattaaaaagcattatcaagaggacaagtcttttagtcatacagccgatcggacactcaccatacttgtaatgagaatataatttcttacccctgaggaacgtagacacgttcctcaatgatagggacttagggtgatagaagtgcaaagcatgactgtcaaatttttggagcaggttttctgacttcggtcggaaaacccctactttctggagtttcaaaaacagaccgtacgccaagggtcatgtcttttttcgtattggtttgtgtcttagttgttaatcctacagtggaggcctggggaataagaagtaacatgtggcctgcacgccataggagaaaaagcgagcatcagccgtatcggctttgtaacacaaattagctatcgtgaagtccgctcagctcttccatttctaccctggctgctttttgcagggattggtccgtggtctccagtctcttgggttctcaccctgtgtgaaaatcttcgtgtttttccctaccccccaagtcacctcttacacagcctctgcttccaagcgcagcccccacaggagtttgtaggatttctgtgctagcggggagtgtgttctcacctcatagagccaggtagaaattatgcagatgggcgctgttctctgggaagaaagcagggcctttggggctctcagtgtccccgttgggttgtagacataacactctta

SEQ ID NO: 875 - DNA, 891 bp, synthetic construct
  source 1..891: mol_type = other DNA
gaagcagcgaggcccctacgagcctcgaggaaaagggaaagggccgctcaccgtcccttggccgccgtcccgcgcttccggatgagctcgtccagcgagagatcggccatcttgcggcgcgcagctagcggagaacggaggagaagccgactgcggcgagcccgccccgcggccggagtcaagagcggcttccggcaacccggacggccaactctcgcgacagctcaaacgaaaagctcgagacggaaggggtggagcctctctccccgtgagcctttgcggtgctcgcttctaatttgcatggaggagtccggagccttatgggctctctctcccccctcctccttttgctaatgaggaattagaattatatcgatcataaaccattaaaaagcattatcaagaggacaagtcttttagtcatacagccgatcggacactcaccatacttgtaatgagaatataatttcttacccctgaggaacgtagacacgttcctcaatgatagggacttagggtgatagaagtgcaaagcatgactgtcaaatttttggagcaggttttctgacttcggtcggaaaacccctcctccggggatacaacgtgtttcctaaaagtagagggaggtaagagacggtagcacctgcggggcggcttgcacgccgagtgcctgtgacgcgccggcttaacttaactgcttccctgaagtaccttgaggttcctgatgtgcgggcggtagacggtaggcttatgcggcacgctgtcgtttccaccgtggctactgcgctttgggaaggccacgacctcctcctttggggaggtccttaggatctcagcttggcagtcgagtgggtggcgaccttttaaaggaatgggacccacccggagttc

SEQ ID NO: 876 - DNA, 1079 bp, synthetic construct
  source 1..1079: mol_type = other DNA
gaagcagcgaggcccctacgagcctcgaggaaaagggaaagggccgctcaccgtcccttggccgccgtcccgcgcttccggatgagctcgtccagcgagagatcggccatcttgcggcgcgcagctagcggagaacggaggagaagccgactgcggcgagcccgccccgcggccggagtcaagagcggcttccggcaacccggacggccaactctcgcgacagctcaaacgaaaagctcgagacggaaggggtggagcctctctccccgtgagcctttgcggtgctcgcttctaatttgcatggaggagtccggagccttatgggctctctctcccccctcctccttttgctaatgaggaattagaattatatcgatcataaaccattaaaaagcattatcaagaggacaagtcttttagtcatacagccgatcggacactcaccatacttgtaatgagaatataatttcttacccctgaggaacgtagacacgttcctcaatgatagggacttagggtgatagaagtgcaaagcatgactgtcaaatttttggagcaggttttctgacttcggtcggaaaacccctttcccttcttgtaatacaaaataataacaaccacagaggacatcgcaagtaaaatgtgtataacaaccccatctaaagaaccctatcatctttctactatctgtctacctaaatatgtatagtataaataaccctatatagcactctaagcaacttaagttaggtaacttagaaaactcttttttttttttgagactgagtctcactctgtcgcacccaggctggagtgcagtggcgtgatctcggctcactgcaacctccaccttctgggttcaagtgattctcccatctcagtctcccaagtagctgggattacaggcacgccaccatgccctgctacatttttttttttttagtagagatgaggtttcaccacattggccaggctgttctcgaactcctgacctcaggtgatccgcccaccttggcctcatgaagtgctgggattacaggtgtgagccactgtacccagccagaaaactcttaaaaaac

SEQ ID NO: 877 - DNA, 969 bp, synthetic construct
  source 1..969: mol_type = other DNA
gaagcagcgaggcccctacgagcctcgaggaaaagggaaagggccgctcaccgtcccttggccgccgtcccgcgcttccggatgagctcgtccagcgagagatcggccatcttgcggcgcgcagctagcggagaacggaggagaagccgactgcggcgagcccgccccgcggccggagtcaagagcggcttccggcaacccggacggccaactctcgcgacagctcaaacgaaaagctcgagacggaaggggtggagcctctctccccgtgagcctttgcggtgctcgcttctaatttgcatggaggagtccggagccttatgggctctctctcccccctcctccttttgctaatgaggaattagaattatatcgatcataaaccattaaaaagcattatcaagaggacaagtcttttagtcatacagccgatcggacactcaccatacttgtaatgagaatataatttcttacccctgaggaacgtagacacgttcctcaatgatagggacttagggtgatagaagtgcaaagcatgactgtcaaatttttggagcaggttttctgacttcggtcggaaaacccctctgaattttcttgcagttgaacaacagaggctttttttgtgtgtgtgggggtgcttggttttgggaggttgaagagtacttgttcgcaaactctctaaatgagagatggggaagtgtcttaccagctgattcgcgagagcacctgcaagtttacctgttttagtgatttgcgtttatgaaagttggagttgctgattttgtgatctctacttttaaggtaaaagcagggcggtgttgacttttcttgccagttggctgtcctgttttctttctcgcactgttttctttttgagacgaagtctgtcgctcaggctggagtgcactggcgtgatctcggctcgctgcaaactttgccgaacccctgtttagcgatttccgtttg

SEQ ID NO: 878 - DNA, 1087 bp, synthetic construct
  source 1..1087: mol_type = other DNA
gaagcagcgaggcccctacgagcctcgaggaaaagggaaagggccgctcaccgtcccttggccgccgtcccgcgcttccggatgagctcgtccagcgagagatcggccatcttgcggcgcgcagctagcggagaacggaggagaagccgactgcggcgagcccgccccgcggccggagtcaagagcggcttccggcaacccggacggccaactctcgcgacagctcaaacgaaaagctcgagacggaaggggtggagcctctctccccgtgagcctttgcggtgctcgcttctaatttgcatggaggagtccggagccttatgggctctctctcccccctcctccttttgctaatgaggaattagaattatatcgatcataaaccattaaaaagcattatcaagaggacaagtcttttagtcatacagccgatcggacactcaccatacttgtaatgagaatataatttcttacccctgaggaacgtagacacgttcctcaatgatagggacttagggtgatagaagtgcaaagcatgactgtcaaatttttggagcaggttttctgacttcggtcggaaaacccctatatgtggtaatccaacaatagaaattatttttaagtttgtgtgttcctttttctgttcaatggtgcttttgatattgttgtaaagcagtgactagcagattctgtgtggtaaaagcactgaaccctgtttagttcttttctccctaccttattggtaattatttctgtgtatatatgttccaaagaaatgcggcttgtatattcatgcttttcaactttttgtgatagacagttgatacacaagtagtacctcctccgggatcttcttagtcaagactgtttggtagatgcatgttttttgttacttgtaatgtacagtattcagttcattttctttttgcagcactgtccggttgaaacacaacgcgaggatcgggcgtggtggctcacgcctgtaatcccagcactttgggaggccgaggcaggacaatcaagaccaatcctggtcatcaaggcaggagaatcaagaccatcgaggtcaggagatcaagaccatcct

SEQ ID NO: 879 - DNA, 1085 bp, synthetic construct
  source 1..1085: mol_type = other DNA
gaagcagcgaggcccctacgagcctcgaggaaaagggaaagggccgctcaccgtcccttggccgccgtcccgcgcttccggatgagctcgtccagcgagagatcggccatcttgcggcgcgcagctagcggagaacggaggagaagccgactgcggcgagcccgccccgcggccggagtcaagagcggcttccggcaacccggacggccaactctcgcgacagctcaaacgaaaagctcgagacggaaggggtggagcctctctccccgtgagcctttgcggtgctcgcttctaatttgcatggaggagtccggagccttatgggctctctctcccccctcctccttttgctaatgaggaattagaattatatcgatcataaaccattaaaaagcattatcaagaggacaagtcttttagtcatacagccgatcggacactcaccatacttgtaatgagaatataatttcttacccctgaggaacgtagacacgttcctcaatgatagggacttagggtgatagaagtgcaaagcatgactgtcaaatttttggagcaggttttctgacttcggtcggaaaacccctacatcaggttgtttttctgtttttacatcaggttgtttttctgtttggttttttttttacaccacgtttatacgccggtgcacggtttaccactgaaaacacctttcatctacaggtgatatcttttaacacaaataaaatgtagtagtcctaggagacggaatagaaggaggtggggcctaggcagattcatctctgcggtgcattttgcctctggccctcgggccctagtttgcgatctttcccatcttgcctctgcttccctctgcacaatcctgagtattgcagtaccttacacttaaggaaatttcgtcttgccaaagttgatccatttcagctccgaaacataacaggaactagtgcaacgataaacgtatgaggaacttgcaataagagtgacagaatcctttgaatcaaaaaaaaaaaaagccaccacttaatgagtatctaccatatgtcaagggcttcaccaatatttcattgaaatattccagacca

SEQ ID NO: 880 - DNA, 1087 bp, synthetic construct
  source 1..1087: mol_type = other DNA
gaagcagcgaggcccctacgagcctcgaggaaaagggaaagggccgctcaccgtcccttggccgccgtcccgcgcttccggatgagctcgtccagcgagagatcggccatcttgcggcgcgcagctagcggagaacggaggagaagccgactgcggcgagcccgccccgcggccggagtcaagagcggcttccggcaacccggacggccaactctcgcgacagctcaaacgaaaagctcgagacggaaggggtggagcctctctccccgtgagcctttgcggtgctcgcttctaatttgcatggaggagtccggagccttatgggctctctctcccccctcctccttttgctaatgaggaattagaattatatcgatcataaaccattaaaaagcattatcaagaggacaagtcttttagtcatacagccgatcggacactcaccatacttgtaatgagaatataatttcttacccctgaggaacgtagacacgttcctcaatgatagggacttagggtgatagaagtgcaaagcatgactgtcaaatttttggagcaggttttctgacttcggtcggaaaacccctcttatgatgtttgttgccaatgatagattgttttcactgtgcaaaaattatgggtagttttggtggtcttgatgcagttgtaagcttggggtatgaaggtttgggccacgcctgggcgcttccggctgcgccggatgctgtttcctttccgctcccaggggcgttgggaacggttgtaggacgtggctctttattcgtgagttttccatttacctccgctgaacctagagcttcagacgccctatggcgtccgcctcgacccaaccggcggccttgagcgctgagcaagcaaagggtgagaatcgtcctagtcaaggcataggctgctggcctggggtagtcaaggcatgggctgctggtctggggaggatgcgggcggaggatgtggggcgacaaacctggctacgtccgccgggaaaatggggtaggggacgccgggtaccgtccttctaagtggggcgcttgcccccaagacttgggatcttattgggttacctaca

SEQ ID NO: 881 - DNA, 1085 bp, synthetic construct
  source 1..1085: mol_type = other DNA
gaagcagcgaggcccctacgagcctcgaggaaaagggaaagggccgctcaccgtcccttggccgccgtcccgcgcttccggatgagctcgtccagcgagagatcggccatcttgcggcgcgcagctagcggagaacggaggagaagccgactgcggcgagcccgccccgcggccggagtcaagagcggcttccggcaacccggacggccaactctcgcgacagctcaaacgaaaagctcgagacggaaggggtggagcctctctccccgtgagcctttgcggtgctcgcttctaatttgcatggaggagtccggagccttatgggctctctctcccccctcctccttttgctaatgaggaattagaattatatcgatcataaaccattaaaaagcattatcaagaggacaagtcttttagtcatacagccgatcggacactcaccatacttgtaatgagaatataatttcttacccctgaggaacgtagacacgttcctcaatgatagggacttagggtgatagaagtgcaaagcatgactgtcaaatttttggagcaggttttctgacttcggtcggaaaaccccttctttactgttatatgttaggcgaaatattacgcgtttggagtaagtggtgctttttgtaactgaaaagagattctgtgtgtgtttttttttttttagaggctgcatagttatttgtatgaaccgcaggtgacctaattagcaaggtaattcagacctgtatcctagcacttaagaagtggaagtgggataaccctgcgtgttctcgtgtgggaggctagcttaagcaacaaagcaggaaggccccaccaacaaaagaatttaaaaattatacgtgcgtggtggcgcgcgtatgaggaaattatttggcaactgtgttacagtatagcagcaaatggaatagacctagtccctgactttaggagacctgcctcagccccccgaatggctgggactacaggcgtgcgcctccgcgcccagctaatttttgcatttttggtagagacgggttcaccatgttggccaggatggtctccatctcttcatctggtgatccgcc

SEQ ID NO: 882 - DNA, 1087 bp, synthetic construct
  source 1..1087: mol_type = other DNA
gaagcagcgaggcccctacgagcctcgaggaaaagggaaagggccgctcaccgtcccttggccgccgtcccgcgcttccggatgagctcgtccagcgagagatcggccatcttgcggcgcgcagctagcggagaacggaggagaagccgactgcggcgagcccgccccgcggccggagtcaagagcggcttccggcaacccggacggccaactctcgcgacagctcaaacgaaaagctcgagacggaaggggtggagcctctctccccgtgagcctttgcggtgctcgcttctaatttgcatggaggagtccggagccttatgggctctctctcccccctcctccttttgctaatgaggaattagaattatatcgatcataaaccattaaaaagcattatcaagaggacaagtcttttagtcatacagccgatcggacactcaccatacttgtaatgagaatataatttcttacccctgaggaacgtagacacgttcctcaatgatagggacttagggtgatagaagtgcaaagcatgactgtcaaatttttggagcaggttttctgacttcggtcggaaaacccctaccttattcacgcctaaaaagtagactgactgtggggtggtcgtgttttttgtttcttgttggtaggtggtgaatgcgtttttttcgttgttttctccgttactcaggctgccagttgcttggcagtcttgtcgctggctgtggacgctctgcacttcatcaccgtccccagctgcgctttgagccggtctaaggttgcccacagtattgacgttgggacccacgaaactggcaatttccatgtgtgcggccttacccagttctcccaaacttctgcgtataaccgcttctctgtgcttcagaaagataagtccggccccggcctcacacagcagctcagttcgtgacagcgtttaatatgtaaaatggagcaaataatttatagggcgttgggagagttaaagagactaattcatttacgtgttaaatacagggaatggcttttgcattgatataaccccagcctccagcatgcgccagacctgacgtaggtgttcggc

SEQ ID NO: 883 - DNA, 1087 bp, synthetic construct
  source 1..1087: mol_type = other DNA
gaagcagcgaggcccctacgagcctcgaggaaaagggaaagggccgctcaccgtcccttggccgccgtcccgcgcttccggatgagctcgtccagcgagagatcggccatcttgcggcgcgcagctagcggagaacggaggagaagccgactgcggcgagcccgccccgcggccggagtcaagagcggcttccggcaacccggacggccaactctcgcgacagctcaaacgaaaagctcgagacggaaggggtggagcctctctccccgtgagcctttgcggtgctcgcttctaatttgcatggaggagtccggagccttatgggctctctctcccccctcctccttttgctaatgaggaattagaattatatcgatcataaaccattaaaaagcattatcaagaggacaagtcttttagtcatacagccgatcggacactcaccatacttgtaatgagaatataatttcttacccctgaggaacgtagacacgttcctcaatgatagggacttagggtgatagaagtgcaaagcatgactgtcaaatttttggagcaggttttctgacttcggtcggaaaaccccttttgacccattacccatctaagttagatgcttttttaaatgttttttaatttttaaatttttaatttttttcattatttattttttatttttgagacggatctcggctcactgtaacctccacctcccgggttcaagcgattctcctgactcagcctcccgagtagctgggattacaggcgcgcgccaccatgcccggctaatttttctatttttagtaaagacggggtttcgccatgttgaccagggtggtcttgaactcctgacgtcaggtgatcctcctgcctcgtgctgggattgcaggcgtgagccaccgctcccggcccttagatgctttttaatcagcaagtacgcaatgctttcctgacaggaatgtcaagtccgtcaggaaatccacataagggtgttaagcaggcaaagtaccacatacagattaaaatcaaaagcactgtcaacgcttatttaatttatacagtagaccctaacttttctaattttgtg

SEQ ID NO: 884 - DNA, 1087 bp, synthetic construct
  source 1..1087: mol_type = other DNA
gaagcagcgaggcccctacgagcctcgaggaaaagggaaagggccgctcaccgtcccttggccgccgtcccgcgcttccggatgagctcgtccagcgagagatcggccatcttgcggcgcgcagctagcggagaacggaggagaagccgactgcggcgagcccgccccgcggccggagtcaagagcggcttccggcaacccggacggccaactctcgcgacagctcaaacgaaaagctcgagacggaaggggtggagcctctctccccgtgagcctttgcggtgctcgcttctaatttgcatggaggagtccggagccttatgggctctctctcccccctcctccttttgctaatgaggaattagaattatatcgatcataaaccattaaaaagcattatcaagaggacaagtcttttagtcatacagccgatcggacactcaccatacttgtaatgagaatataatttcttacccctgaggaacgtagacacgttcctcaatgatagggacttagggtgatagaagtgcaaagcatgactgtcaaatttttggagcaggttttctgacttcggtcggaaaacccctgtttacttggttttaaaaatagcttgcactagcgataccgcgaatatggttattaggtttgttaggcacagtcgtgtcttactatagaaaaataacgtagtgttcattttgctgcctgtatgtgttaatttgtccttattgcgccattgttcttgttaagtcttctgtaaggagttgcgggtttcaaactgtcagtctgagagcataagctcacttttcagtcagttgaattgaatgttacattcgattggttctggatattgatattacccaaggcttgtcctgtttgtaagtcttttcctacacctgacaatatgattatgtttacaatgtccctagaactctgggtgtatcgttcccactgaataaaatttgatctctaagttgacctataaatttaagtaccaaaaaactggtttgtaagattttggaaggcagaggcagggaagagaccaacgtggtctacatataaagtaccaggtacatataaagtaccaggt

SEQ ID NO: 885 - DNA, 1083 bp, synthetic construct
  source 1..1083: mol_type = other DNA
gaagcagcgaggcccctacgagcctcgaggaaaagggaaagggccgctcaccgtcccttggccgccgtcccgcgcttccggatgagctcgtccagcgagagatcggccatcttgcggcgcgcagctagcggagaacggaggagaagccgactgcggcgagcccgccccgcggccggagtcaagagcggcttccggcaacccggacggccaactctcgcgacagctcaaacgaaaagctcgagacggaaggggtggagcctctctccccgtgagcctttgcggtgctcgcttctaatttgcatggaggagtccggagccttatgggctctctctcccccctcctccttttgctaatgaggaattagaattatatcgatcataaaccattaaaaagcattatcaagaggacaagtcttttagtcatacagccgatcggacactcaccatacttgtaatgagaatataatttcttacccctgaggaacgtagacacgttcctcaatgatagggacttagggtgatagaagtgcaaagcatgactgtcaaatttttggagcaggttttctgacttcggtcggaaaacccctatttttgtggtgctaaaagttagattgcattccgcccttctcacgtctctttacgtgttgtttgcgaggcgtggcctcggaggtaaatggtctccttttacctcagataagcttacctttgctctgtgagtaagaatgtagctacacttccaaatttagctattgtcctttgcggtccaaatgaaaatattaccttccgatctaacaatgttaaactagtcccaggcccttctatcgattgccagaatagactagactactacacagacacaccctctcaaatcaggccagctcctgcaacctgcacctacagtttgtcccctgggacaaatgaaaggacaggccctctttcccccccccccccaaatcagagcacacacagatcttggggtctggggcagaaatttcgttcatggaaaaaacaaacaaacaaacaaacacgatcaaaggaagctcgttccctttggcctcagggtttcttagacgccgtgttccc

SEQ ID NO: 886 - DNA, 1084 bp, synthetic construct
  source 1..1084: mol_type = other DNA
gaagcagcgaggcccctacgagcctcgaggaaaagggaaagggccgctcaccgtcccttggccgccgtcccgcgcttccggatgagctcgtccagcgagagatcggccatcttgcggcgcgcagctagcggagaacggaggagaagccgactgcggcgagcccgccccgcggccggagtcaagagcggcttccggcaacccggacggccaactctcgcgacagctcaaacgaaaagctcgagacggaaggggtggagcctctctccccgtgagcctttgcggtgctcgcttctaatttgcatggaggagtccggagccttatgggctctctctcccccctcctccttttgctaatgaggaattagaattatatcgatcataaaccattaaaaagcattatcaagaggacaagtcttttagtcatacagccgatcggacactcaccatacttgtaatgagaatataatttcttacccctgaggaacgtagacacgttcctcaatgatagggacttagggtgatagaagtgcaaagcatgactgtcaaatttttggagcaggttttctgacttcggtcggaaaacccctataactggtaaccaaaagcagattactttcccccttgtggtcttcgcgtttgcggacgggagagaactttcggccattttccttttagaaatttaacttcttgaaggccaccaggtgacccttacttccctctcacctttccttctacctgtactttctctattaaaaagcctgcagaagtacccttgacaaattgccaaaaatgacacctaaaaaaaaaaaaaggaaaaacgacaccttaggtaattataggttgtaagaaaaagatttgacctcttggagtttttatttcttaataccaaaggacacccaaggaacgtatctctcaaaattgggtttcaaacctcagccgtttccttcttagttccagtgcttaacacgcaacagacctgcacaccactacactgcatacgagttttaaagttaataaatcagtcacccctccatagtcttctacctacttgaagacagaaacggctgctaggaagcaattcttc

SEQ ID NO: 887 - DNA, 1087 bp, synthetic construct
  source 1..1087: mol_type = other DNA
gaagcagcgaggcccctacgagcctcgaggaaaagggaaagggccgctcaccgtcccttggccgccgtcccgcgcttccggatgagctcgtccagcgagagatcggccatcttgcggcgcgcagctagcggagaacggaggagaagccgactgcggcgagcccgccccgcggccggagtcaagagcggcttccggcaacccggacggccaactctcgcgacagctcaaacgaaaagctcgagacggaaggggtggagcctctctccccgtgagcctttgcggtgctcgcttctaatttgcatggaggagtccggagccttatgggctctctctcccccctcctccttttgctaatgaggaattagaattatatcgatcataaaccattaaaaagcattatcaagaggacaagtcttttagtcatacagccgatcggacactcaccatacttgtaatgagaatataatttcttacccctgaggaacgtagacacgttcctcaatgatagggacttagggtgatagaagtgcaaagcatgactgtcaaatttttggagcaggttttctgacttcggtcggaaaacccctctggggaataagagtggtttaaagaaagaacaatttgagagatctgcttagatctaataaaacccaagtatagtttctttagacgtcttatatctcacgtaggacctcttatttcagactcactgcaagaacaagctaaagaactatatacagtcaggaacaaggtgagccatcgcggttctcagtcccatgatcttaagagtttttcctcttcccctcttccctggctgtcctggagctcactctgtagaccaggctggtctcaaactcagaaatccacttacctctgcctcccaagggctgggattaaaggcatgcaccaccattgcccggcagggtatgtggactatgctgtccttcaactcagagatcgtggtactttaaatctcattttccgaaagaaaagaaaagaaaggaaggggggaaataaagccagtatattttgcacccacaatctgaagttctacaaatattgttagaaaatgcaaaggacccaagtc

SEQ ID NO: 888 - DNA, 1087 bp, synthetic construct
  source 1..1087: mol_type = other DNA
gaagcagcgaggcccctacgagcctcgaggaaaagggaaagggccgctcaccgtcccttggccgccgtcccgcgcttccggatgagctcgtccagcgagagatcggccatcttgcggcgcgcagctagcggagaacggaggagaagccgactgcggcgagcccgccccgcggccggagtcaagagcggcttccggcaacccggacggccaactctcgcgacagctcaaacgaaaagctcgagacggaaggggtggagcctctctccccgtgagcctttgcggtgctcgcttctaatttgcatggaggagtccggagccttatgggctctctctcccccctcctccttttgctaatgaggaattagaattatatcgatcataaaccattaaaaagcattatcaagaggacaagtcttttagtcatacagccgatcggacactcaccatacttgtaatgagaatataatttcttacccctgaggaacgtagacacgttcctcaatgatagggacttagggtgatagaagtgcaaagcatgactgtcaaatttttggagcaggttttctgacttcggtcggaaaacccctctcggtttatcttaaagggttttaaatatagaaagcttccttagtcttatgggtgagagtgctgtttaagccttacctaggtatgtctttgaacatttattacagattgttatttgtgactatgaccactcaggtgttctgttcttgtgaatttagacacactcagaaaggctacacactcaaagaccacaccaaagtgaagtactatctgggccgtgaaactggtcacatatcagttattttgcagtaaaacaaggaagtcaatcatactgcttcagtgggtcagggagtcaagaatgcacagtacaagagctggtgagattcctcagcaggtaagagcactgaatgctcttccaaagattctgagttcaaatcccagcaaccacgtggtggatttgaacaaaggatgaaaacaaccatccataaccagatctgatgccctcttctggagtgtcaaaagacagctatggtgtacttacataaataaataagtaaaaaca

SEQ ID NO: 889 - DNA, 1087 bp, synthetic construct
  source 1..1087: mol_type = other DNA
gaagcagcgaggcccctacgagcctcgaggaaaagggaaagggccgctcaccgtcccttggccgccgtcccgcgcttccggatgagctcgtccagcgagagatcggccatcttgcggcgcgcagctagcggagaacggaggagaagccgactgcggcgagcccgccccgcggccggagtcaagagcggcttccggcaacccggacggccaactctcgcgacagctcaaacgaaaagctcgagacggaaggggtggagcctctctccccgtgagcctttgcggtgctcgcttctaatttgcatggaggagtccggagccttatgggctctctctcccccctcctccttttgctaatgaggaattagaattatatcgatcataaaccattaaaaagcattatcaagaggacaagtcttttagtcatacagccgatcggacactcaccatacttgtaatgagaatataatttcttacccctgaggaacgtagacacgttcctcaatgatagggacttagggtgatagaagtgcaaagcatgactgtcaaatttttggagcaggttttctgacttcggtcggaaaacccctccacattttgtgtttaaaaatagaaatatttaagtgagatcagtttaaatctgctttatctagggtgtctaactgcttgcatctttttaacttttccttatttgtgagaaggtctgtaaaacttattatatgttagtacactgtagctgtcttcagacactccagaagagggattcagatcaccttacagatggttttgagccaccatgtggttgctgggatttgaactcaggacctttagaaaagtagttgggtgctcttacccgctgagccatctcaccagccctttttttttcttttttccagttcgggtttctctgtgtgtagccctggctgtcctggaactcattctgtagaccgggctggcctcgaactcagaaatctgcctgcctctgcctcccaagtgctgggattaaaggaatgtgccttcattgcccggctctagggctttttgttgttgtttgtttgtttgtttgtttgtttgcttttgtggatggcct

SEQ ID NO: 890 - DNA, 1087 bp, synthetic construct
  source 1..1087: mol_type = other DNA
gaagcagcgaggcccctacgagcctcgaggaaaagggaaagggccgctcaccgtcccttggccgccgtcccgcgcttccggatgagctcgtccagcgagagatcggccatcttgcggcgcgcagctagcggagaacggaggagaagccgactgcggcgagcccgccccgcggccggagtcaagagcggcttccggcaacccggacggccaactctcgcgacagctcaaacgaaaagctcgagacggaaggggtggagcctctctccccgtgagcctttgcggtgctcgcttctaatttgcatggaggagtccggagccttatgggctctctctcccccctcctccttttgctaatgaggaattagaattatatcgatcataaaccattaaaaagcattatcaagaggacaagtcttttagtcatacagccgatcggacactcaccatacttgtaatgagaatataatttcttacccctgaggaacgtagacacgttcctcaatgatagggacttagggtgatagaagtgcaaagcatgactgtcaaatttttggagcaggttttctgacttcggtcggaaaacccctaaaaccagtaagggagaaaggtcaagtaacatataaaggaaggcctatcagaattacaccagacttttcaccagagactatgaaagccagaagagcctggacagatgttatacagacactaagagaacacaaatgccagcccaggctactatacctggccaaactctcaattaccatagatggagaaaccaaagtattccacgacaaaaacaaattcacacaatatctttccacgaatccagcccttcaaaggataatgacagaaaagaagcaatacaaggacggaaatcacgccctagaacaaccaagaaactaatcattcaacaaaccaaaaagaagacagccacaagaacagaatgccaactctaacaacaaaaataaaaggaagcaacaattacttttccttaatatctcttaatatcaatggactcaattccccaataaaaagacatagactaacagactggctacacaaacaggacccaacattctgctgctta

SEQ ID NO: 891 - DNA, 1087 bp, synthetic construct
  source 1..1087: mol_type = other DNA
gaagcagcgaggcccctacgagcctcgaggaaaagggaaagggccgctcaccgtcccttggccgccgtcccgcgcttccggatgagctcgtccagcgagagatcggccatcttgcggcgcgcagctagcggagaacggaggagaagccgactgcggcgagcccgccccgcggccggagtcaagagcggcttccggcaacccggacggccaactctcgcgacagctcaaacgaaaagctcgagacggaaggggtggagcctctctccccgtgagcctttgcggtgctcgcttctaatttgcatggaggagtccggagccttatgggctctctctcccccctcctccttttgctaatgaggaattagaattatatcgatcataaaccattaaaaagcattatcaagaggacaagtcttttagtcatacagccgatcggacactcaccatacttgtaatgagaatataatttcttacccctgaggaacgtagacacgttcctcaatgatagggacttagggtgatagaagtgcaaagcatgactgtcaaatttttggagcaggttttctgacttcggtcggaaaacccctcccaatttcactggtctacaatgaaagcaaaacagttctcttccccgctccccggtgtgtgagaggggctttgatccttctctggtttcctaggaaacgcgtatgtgctagagccacgctctgagacttccgcctcgtgcggtcccgcttcctttctgcctcctctggcctgcatccgtgggggaggtggctggctgcagggttctccggatctcttctgtgttcccactactcaagcaccgagtggcgttctatggcgtccgcctcggctcagcccgcggccctgagcgcggagcaggccaagggtgaggaaagagcctagtctgggtgtgggccgtcttctggggggagggcgcgatactattctttgcctctccaagtggggcccttgcccattagggcgaagggttgggaggacaagcttatcgggttgcttgcaggcctcggcccactaattccctgcctcttccctcctctgggctcgcccgccgtcctccgcg

SEQ ID NO: 892 - DNA, 1087 bp, synthetic construct
  source 1..1087: mol_type = other DNA
gaagcagcgaggcccctacgagcctcgaggaaaagggaaagggccgctcaccgtcccttggccgccgtcccgcgcttccggatgagctcgtccagcgagagatcggccatcttgcggcgcgcagctagcggagaacggaggagaagccgactgcggcgagcccgccccgcggccggagtcaagagcggcttccggcaacccggacggccaactctcgcgacagctcaaacgaaaagctcgagacggaaggggtggagcctctctccccgtgagcctttgcggtgctcgcttctaatttgcatggaggagtccggagccttatgggctctctctcccccctcctccttttgctaatgaggaattagaattatatcgatcataaaccattaaaaagcattatcaagaggacaagtcttttagtcatacagccgatcggacactcaccatacttgtaatgagaatataatttcttacccctgaggaacgtagacacgttcctcaatgatagggacttagggtgatagaagtgcaaagcatgactgtcaaatttttggagcaggttttctgacttcggtcggaaaacccctgaatttgttaaattacaggaggaagcttttttagttcattttacaaatactttcttgttaggtagataataccttctaaggttattatctggatcttctaagtctttttatcgctagcaagtctaagtttctggactttggaattagaagttaatgtcgtaggcgggcatggtggtccacgcctttaatcccagagtttgggaggcagacgcaggtggttttctgagttcgaggccatcctgctcttcaatgttagttccaggacagccagggttatacaaagaaaccctgtctcgagaaacaaaacaaacaaaaaaagagtagctgagtgctctgagttgtctctccagccccttagctatttattttcatttaaattatttttgttttattcgcttgtgtgcctgagtttgaatttcccgggattaacagttgaagactagggctggtgagatggctcagcggttaagattgccgactgctcttccaaaggtcctgag

SEQ ID NO: 893 - DNA, 1087 bp, synthetic construct
  source 1..1087: mol_type = other DNA
gaagcagcgaggcccctacgagcctcgaggaaaagggaaagggccgctcaccgtcccttggccgccgtcccgcgcttccggatgagctcgtccagcgagagatcggccatcttgcggcgcgcagctagcggagaacggaggagaagccgactgcggcgagcccgccccgcggccggagtcaagagcggcttccggcaacccggacggccaactctcgcgacagctcaaacgaaaagctcgagacggaaggggtggagcctctctccccgtgagcctttgcggtgctcgcttctaatttgcatggaggagtccggagccttatgggctctctctcccccctcctccttttgctaatgaggaattagaattatatcgatcataaaccattaaaaagcattatcaagaggacaagtcttttagtcatacagccgatcggacactcaccatacttgtaatgagaatataatttcttacccctgaggaacgtagacacgttcctcaatgatagggacttagggtgatagaagtgcaaagcatgactgtcaaatttttggagcaggttttctgacttcggtcggaaaacccctaccccctaattctacaagaatagaaagcttagcagctcctctgaatggttgctctcaggtgctagtggttgcaagtcgtatgttgatgcctgcctttgccctacctggtgtgtgagcgtgagcgcgccccacctctccagcctctctcttactgtttttcagacaagatgggactgttgttctcctactgctatgtacctcaatttcaattgatcatgcctggacataactgcccatgttgtaaggtcgtctacgttgtaaggtcgtgctcagtttctgatgcctagactagtcacctttccgtttgcctcctgactgtgtaaatgaggcaaatgaaggtggtctcttaactgacatgttagtgtttgacctatgggatagtttctcattgttgagacagaatttctagaagctggtccgctgagcggctaagagcacttgctgatattgcaaaggatctacctgggtttggttctcagcactcacatggaagttcacat

SEQ ID NO: 894 - DNA, 654 bp, synthetic construct
  source 1..654: mol_type = other DNA
gaagcagcgaggcccctacgagcctcgaggaaaagggaaagggccgctcaccgtcccttggccgccgtcccgcgcttccggatgagctcgtccagcgagagatcggccatcttgcggcgcgcagctagcggagaacggaggagaagccgactgcggcgagcccgccccgcggccggagtcaagagcggcttccggcaacccggacggccaactctcgcgacagctcaaacgaaaagctcgagacggaaggggtggagcctctctccccgtgagcctttgcggtgctcgcttctaatttgcatggaggagtccggagccttatgggctctctctcccccctcctccttttgctaatgaggaattagaattatatcgatcataaaccattaaaaagcattatcaagaggacaagtcttttagtcatacagccgatcggacactcaccatacttgtaatgagaatataatttcttacccctgaggaacgtagacacgttcctcaatgatagggacttagggtgatagaagtgcaaagcatgactgtcaaatttttggagcaggttttctgacttcggtcggaaaaccccttgtagttcctgcaatttaattttcgtttaaaactttattttattctttaacttaaaaaaaatatata

SEQ ID NO: 895 - DNA, 1087 bp, synthetic construct
  source 1..1087: mol_type = other DNA
cgcttcggtgtgtcacttcggccacagagggagacagacgattacggcccacggaaggccgcgtgagtctcgtgaagctggagatgcgctgggtctacctttcgccgtccgctccgccttggcagaggcgccgacacgcaccgaaggcagagaacccatctcgtatgggaccgcaccggacacgggcgcctgggccaggagcagagccgggccgtagaatagacatggccgtcgggggcggggcttcggaaggtttaaccaatccaaactgttgtattttgcatagccccaaagcattttggttaacagtaaaaacatcctaaatttaagtattttaatttaaacttagaacgaagcgagtataaaaaggattatttaaccctaaaacggattcaggatttgttataatatcaagtacagtcggctacataaggtcaccacatgtgtaaagttacaaaattctatggccttatatacctaccaagagcctgcttactctcaatgatagggacttagggtgatagaagtgcaaagcatgactgtcaaatttttggagcaggttttctgacttcggtcggaaaacccctactttctggagtttcaaaaacagactgtacgccaagggtcatatctttttttgtattggtttgtgtcttggttggtgtcttaggtgttaatcctacagtggagggtttatgggaataggaagtaacatgtcgcctgcatgtcataggagaaaaagcgagcatcagccgtatcggctttgtaacacaaattagctatcgtgaagtccgctcagctcttccctttctaccctggctgctttttgcagggattggtccgtggtctccagtctcttgggttctcaccctgtgtgaaaatcttcgtgtttttccctaccccccagtcacctcttacacagcctctgcttccaagcgcagcccccacaggagtttgtaggatttctgtgctagcggggaatgtgttctcacctcatagagccaggtagaaattatgcagatgggcagttctctgggaagaaagcagggcctttggggctctcagtgtccccgttgggttgtagaca

SEQ ID NO: 896 - DNA, 1087 bp, synthetic construct
  source 1..1087: mol_type = other DNA
cgcttcggtgtgtcacttcggccacagagggagacagacgattacggcccacggaaggccgcgtgagtctcgtgaagctggagatgcgctgggtctacctttcgccgtccgctccgccttggcagaggcgccgacacgcaccgaaggcagagaacccatctcgtatgggaccgcaccggacacgggcgcctgggccaggagcagagccgggccgtagaatagacatggccgtcgggggcggggcttcggaaggtttaaccaatccaaactgttgtattttgcatagccccaaagcattttggttaacagtaaaaacatcctaaatttaagtattttaatttaaacttagaacgaagcgagtataaaaaggattatttaaccctaaaacggattcaggatttgttataatatcaagtacagtcggctacataaggtcaccacatgtgtaaagttacaaaattctatggccttatatacctaccaagagcctgcttactctcaatgatagggacttagggtgatagaagtgcaaagcatgactgtcaaatttttggagcaggttttctgacttcggtcggaaaacccctactttctggagtttctaaaagtagactgtacgctaagggtcatatctttttttgttttggtttgtgtcttggttggcgtcttaaatgttaatcctacagtggagggctggcgaataggaagtaacatgtcgcctgcacgccataggagaaaaagcgagcatcagccgtatcggctttgtaacacaaattagctatcgtgaagtccgctcagctcttccctttctaccctggctgctttttgcagggattggtccgtggtctccagtctcttgggttctcaccctgtgtgaaaatcttcctgtttttccctaccccccaagtcacctcttacacagcctctgcttccaagcgcagcccccacaggagtttgtaggatttctgtgctagcggggagtgtgttctcacctcatagagccaggtagaaactacgcagatgggtgctgttctccaggaagaaagcagggcctttggggctctcagtgtccccgttgggttgtaga

SEQ ID NO: 897 - DNA, 1087 bp, synthetic construct
  source 1..1087: mol_type = other DNA
cgcttcggtgtgtcacttcggccacagagggagacagacgattacggcccacggaaggccgcgtgagtctcgtgaagctggagatgcgctgggtctacctttcgccgtccgctccgccttggcagaggcgccgacacgcaccgaaggcagagaacccatctcgtatgggaccgcaccggacacgggcgcctgggccaggagcagagccgggccgtagaatagacatggccgtcgggggcggggcttcggaaggtttaaccaatccaaactgttgtattttgcatagccccaaagcattttggttaacagtaaaaacatcctaaatttaagtattttaatttaaacttagaacgaagcgagtataaaaaggattatttaaccctaaaacggattcaggatttgttataatatcaagtacagtcggctacataaggtcaccacatgtgtaaagttacaaaattctatggccttatatacctaccaagagcctgcttactctcaatgatagggacttagggtgatagaagtgcaaagcatgactgtcaaatttttggagcaggttttctgacttcggtcggaaaacccctactttctggagtttcaaaaacagaccgtacgccaagggtcatgtcttttttcgtattggtttgtgtcttagttgttaatcctacagtggaggcctggggaataagaagtaacatgtggcctgcacgccataggagaaaaagcgagcatcagccgtatcggctttgtaacacaaattagctatcgtgaagtccgctcagctcttccatttctaccctggctgctttttgcagggattggtccgtggtctccagtctcttgggttctcaccctgtgtgaaaatcttcgtgtttttccctaccccccaagtcacctcttacacagcctctgcttccaagcgcagcccccacaggagtttgtaggatttctgtgctagcggggagtgtgttctcacctcatagagccaggtagaaattatgcagatgggcgctgttctctgggaagaaagcagggcctttggggctctcagtgtccccgttgggttgtagacataacactctta

SEQ ID NO: 898 - DNA, 891 bp, synthetic construct
  source 1..891: mol_type = other DNA
cgcttcggtgtgtcacttcggccacagagggagacagacgattacggcccacggaaggccgcgtgagtctcgtgaagctggagatgcgctgggtctacctttcgccgtccgctccgccttggcagaggcgccgacacgcaccgaaggcagagaacccatctcgtatgggaccgcaccggacacgggcgcctgggccaggagcagagccgggccgtagaatagacatggccgtcgggggcggggcttcggaaggtttaaccaatccaaactgttgtattttgcatagccccaaagcattttggttaacagtaaaaacatcctaaatttaagtattttaatttaaacttagaacgaagcgagtataaaaaggattatttaaccctaaaacggattcaggatttgttataatatcaagtacagtcggctacataaggtcaccacatgtgtaaagttacaaaattctatggccttatatacctaccaagagcctgcttactctcaatgatagggacttagggtgatagaagtgcaaagcatgactgtcaaatttttggagcaggttttctgacttcggtcggaaaacccctcctccggggatacaacgtgtttcctaaaagtagagggaggtaagagacggtagcacctgcggggcggcttgcacgccgagtgcctgtgacgcgccggcttaacttaactgcttccctgaagtaccttgaggttcctgatgtgcgggcggtagacggtaggcttatgcggcacgctgtcgtttccaccgtggctactgcgctttgggaaggccacgacctcctcctttggggaggtccttaggatctcagcttggcagtcgagtgggtggcgaccttttaaaggaatgggacccacccggagttc

SEQ ID NO: 899 - DNA, 1079 bp, synthetic construct
  source 1..1079: mol_type = other DNA
cgcttcggtgtgtcacttcggccacagagggagacagacgattacggcccacggaaggccgcgtgagtctcgtgaagctggagatgcgctgggtctacctttcgccgtccgctccgccttggcagaggcgccgacacgcaccgaaggcagagaacccatctcgtatgggaccgcaccggacacgggcgcctgggccaggagcagagccgggccgtagaatagacatggccgtcgggggcggggcttcggaaggtttaaccaatccaaactgttgtattttgcatagccccaaagcattttggttaacagtaaaaacatcctaaatttaagtattttaatttaaacttagaacgaagcgagtataaaaaggattatttaaccctaaaacggattcaggatttgttataatatcaagtacagtcggctacataaggtcaccacatgtgtaaagttacaaaattctatggccttatatacctaccaagagcctgcttactctcaatgatagggacttagggtgatagaagtgcaaagcatgactgtcaaatttttggagcaggttttctgacttcggtcggaaaacccctttcccttcttgtaatacaaaataataacaaccacagaggacatcgcaagtaaaatgtgtataacaaccccatctaaagaaccctatcatctttctactatctgtctacctaaatatgtatagtataaataaccctatatagcactctaagcaacttaagttaggtaacttagaaaactcttttttttttttgagactgagtctcactctgtcgcacccaggctggagtgcagtggcgtgatctcggctcactgcaacctccaccttctgggttcaagtgattctcccatctcagtctcccaagtagctgggattacaggcacgccaccatgccctgctacatttttttttttttagtagagatgaggtttcaccacattggccaggctgttctcgaactcctgacctcaggtgatccgcccaccttggcctcatgaagtgctgggattacaggtgtgagccactgtacccagccagaaaactcttaaaaaac

SEQ ID NO: 900 - DNA, 969 bp, synthetic construct
  source 1..969: mol_type = other DNA
cgcttcggtgtgtcacttcggccacagagggagacagacgattacggcccacggaaggccgcgtgagtctcgtgaagctggagatgcgctgggtctacctttcgccgtccgctccgccttggcagaggcgccgacacgcaccgaaggcagagaacccatctcgtatgggaccgcaccggacacgggcgcctgggccaggagcagagccgggccgtagaatagacatggccgtcgggggcggggcttcggaaggtttaaccaatccaaactgttgtattttgcatagccccaaagcattttggttaacagtaaaaacatcctaaatttaagtattttaatttaaacttagaacgaagcgagtataaaaaggattatttaaccctaaaacggattcaggatttgttataatatcaagtacagtcggctacataaggtcaccacatgtgtaaagttacaaaattctatggccttatatacctaccaagagcctgcttactctcaatgatagggacttagggtgatagaagtgcaaagcatgactgtcaaatttttggagcaggttttctgacttcggtcggaaaacccctctgaattttcttgcagttgaacaacagaggctttttttgtgtgtgtgggggtgcttggttttgggaggttgaagagtacttgttcgcaaactctctaaatgagagatggggaagtgtcttaccagctgattcgcgagagcacctgcaagtttacctgttttagtgatttgcgtttatgaaagttggagttgctgattttgtgatctctacttttaaggtaaaagcagggcggtgttgacttttcttgccagttggctgtcctgttttctttctcgcactgttttctttttgagacgaagtctgtcgctcaggctggagtgcactggcgtgatctcggctcgctgcaaactttgccgaacccctgtttagcgatttccgtttg

SEQ ID NO: 901 - DNA, 1087 bp, synthetic construct
  source 1..1087: mol_type = other DNA
cgcttcggtgtgtcacttcggccacagagggagacagacgattacggcccacggaaggccgcgtgagtctcgtgaagctggagatgcgctgggtctacctttcgccgtccgctccgccttggcagaggcgccgacacgcaccgaaggcagagaacccatctcgtatgggaccgcaccggacacgggcgcctgggccaggagcagagccgggccgtagaatagacatggccgtcgggggcggggcttcggaaggtttaaccaatccaaactgttgtattttgcatagccccaaagcattttggttaacagtaaaaacatcctaaatttaagtattttaatttaaacttagaacgaagcgagtataaaaaggattatttaaccctaaaacggattcaggatttgttataatatcaagtacagtcggctacataaggtcaccacatgtgtaaagttacaaaattctatggccttatatacctaccaagagcctgcttactctcaatgatagggacttagggtgatagaagtgcaaagcatgactgtcaaatttttggagcaggttttctgacttcggtcggaaaacccctatatgtggtaatccaacaatagaaattatttttaagtttgtgtgttcctttttctgttcaatggtgcttttgatattgttgtaaagcagtgactagcagattctgtgtggtaaaagcactgaaccctgtttagttcttttctccctaccttattggtaattatttctgtgtatatatgttccaaagaaatgcggcttgtatattcatgcttttcaactttttgtgatagacagttgatacacaagtagtacctcctccgggatcttcttagtcaagactgtttggtagatgcatgttttttgttacttgtaatgtacagtattcagttcattttctttttgcagcactgtccggttgaaacacaacgcgaggatcgggcgtggtggctcacgcctgtaatcccagcactttgggaggccgaggcaggacaatcaagaccaatcctggtcatcaaggcaggagaatcaagaccatcgaggtcaggagatcaagaccatcct

SEQ ID NO: 902 - DNA, 1085 bp, synthetic construct
  source 1..1085: mol_type = other DNA
cgcttcggtgtgtcacttcggccacagagggagacagacgattacggcccacggaaggccgcgtgagtctcgtgaagctggagatgcgctgggtctacctttcgccgtccgctccgccttggcagaggcgccgacacgcaccgaaggcagagaacccatctcgtatgggaccgcaccggacacgggcgcctgggccaggagcagagccgggccgtagaatagacatggccgtcgggggcggggcttcggaaggtttaaccaatccaaactgttgtattttgcatagccccaaagcattttggttaacagtaaaaacatcctaaatttaagtattttaatttaaacttagaacgaagcgagtataaaaaggattatttaaccctaaaacggattcaggatttgttataatatcaagtacagtcggctacataaggtcaccacatgtgtaaagttacaaaattctatggccttatatacctaccaagagcctgcttactctcaatgatagggacttagggtgatagaagtgcaaagcatgactgtcaaatttttggagcaggttttctgacttcggtcggaaaacccctacatcaggttgtttttctgtttttacatcaggttgtttttctgtttggttttttttttacaccacgtttatacgccggtgcacggtttaccactgaaaacacctttcatctacaggtgatatcttttaacacaaataaaatgtagtagtcctaggagacggaatagaaggaggtggggcctaggcagattcatctctgcggtgcattttgcctctggccctcgggccctagtttgcgatctttcccatcttgcctctgcttccctctgcacaatcctgagtattgcagtaccttacacttaaggaaatttcgtcttgccaaagttgatccatttcagctccgaaacataacaggaactagtgcaacgataaacgtatgaggaacttgcaataagagtgacagaatcctttgaatcaaaaaaaaaaaaagccaccacttaatgagtatctaccatatgtcaagggcttcaccaatatttcattgaaatattccagacca

SEQ ID NO: 903 - DNA, 1087 bp, synthetic construct
  source 1..1087: mol_type = other DNA
cgcttcggtgtgtcacttcggccacagagggagacagacgattacggcccacggaaggccgcgtgagtctcgtgaagctggagatgcgctgggtctacctttcgccgtccgctccgccttggcagaggcgccgacacgcaccgaaggcagagaacccatctcgtatgggaccgcaccggacacgggcgcctgggccaggagcagagccgggccgtagaatagacatggccgtcgggggcggggcttcggaaggtttaaccaatccaaactgttgtattttgcatagccccaaagcattttggttaacagtaaaaacatcctaaatttaagtattttaatttaaacttagaacgaagcgagtataaaaaggattatttaaccctaaaacggattcaggatttgttataatatcaagtacagtcggctacataaggtcaccacatgtgtaaagttacaaaattctatggccttatatacctaccaagagcctgcttactctcaatgatagggacttagggtgatagaagtgcaaagcatgactgtcaaatttttggagcaggttttctgacttcggtcggaaaacccctcttatgatgtttgttgccaatgatagattgttttcactgtgcaaaaattatgggtagttttggtggtcttgatgcagttgtaagcttggggtatgaaggtttgggccacgcctgggcgcttccggctgcgccggatgctgtttcctttccgctcccaggggcgttgggaacggttgtaggacgtggctctttattcgtgagttttccatttacctccgctgaacctagagcttcagacgccctatggcgtccgcctcgacccaaccggcggccttgagcgctgagcaagcaaagggtgagaatcgtcctagtcaaggcataggctgctggcctggggtagtcaaggcatgggctgctggtctggggaggatgcgggcggaggatgtggggcgacaaacctggctacgtccgccgggaaaatggggtaggggacgccgggtaccgtccttctaagtggggcgcttgcccccaagacttgggatcttattgggttacctaca

SEQ ID NO: 904 - DNA, 1085 bp, synthetic construct
  source 1..1085: mol_type = other DNA
cgcttcggtgtgtcacttcggccacagagggagacagacgattacggcccacggaaggccgcgtgagtctcgtgaagctggagatgcgctgggtctacctttcgccgtccgctccgccttggcagaggcgccgacacgcaccgaaggcagagaacccatctcgtatgggaccgcaccggacacgggcgcctgggccaggagcagagccgggccgtagaatagacatggccgtcgggggcggggcttcggaaggtttaaccaatccaaactgttgtattttgcatagccccaaagcattttggttaacagtaaaaacatcctaaatttaagtattttaatttaaacttagaacgaagcgagtataaaaaggattatttaaccctaaaacggattcaggatttgttataatatcaagtacagtcggctacataaggtcaccacatgtgtaaagttacaaaattctatggccttatatacctaccaagagcctgcttactctcaatgatagggacttagggtgatagaagtgcaaagcatgactgtcaaatttttggagcaggttttctgacttcggtcggaaaaccccttctttactgttatatgttaggcgaaatattacgcgtttggagtaagtggtgctttttgtaactgaaaagagattctgtgtgtgtttttttttttttagaggctgcatagttatttgtatgaaccgcaggtgacctaattagcaaggtaattcagacctgtatcctagcacttaagaagtggaagtgggataaccctgcgtgttctcgtgtgggaggctagcttaagcaacaaagcaggaaggccccaccaacaaaagaatttaaaaattatacgtgcgtggtggcgcgcgtatgaggaaattatttggcaactgtgttacagtatagcagcaaatggaatagacctagtccctgactttaggagacctgcctcagccccccgaatggctgggactacaggcgtgcgcctccgcgcccagctaatttttgcatttttggtagagacgggttcaccatgttggccaggatggtctccatctcttcatctggtgatccgcc

SEQ ID NO: 905 - DNA, 1087 bp, synthetic construct
  source 1..1087: mol_type = other DNA
cgcttcggtgtgtcacttcggccacagagggagacagacgattacggcccacggaaggccgcgtgagtctcgtgaagctggagatgcgctgggtctacctttcgccgtccgctccgccttggcagaggcgccgacacgcaccgaaggcagagaacccatctcgtatgggaccgcaccggacacgggcgcctgggccaggagcagagccgggccgtagaatagacatggccgtcgggggcggggcttcggaaggtttaaccaatccaaactgttgtattttgcatagccccaaagcattttggttaacagtaaaaacatcctaaatttaagtattttaatttaaacttagaacgaagcgagtataaaaaggattatttaaccctaaaacggattcaggatttgttataatatcaagtacagtcggctacataaggtcaccacatgtgtaaagttacaaaattctatggccttatatacctaccaagagcctgcttactctcaatgatagggacttagggtgatagaagtgcaaagcatgactgtcaaatttttggagcaggttttctgacttcggtcggaaaacccctaccttattcacgcctaaaaagtagactgactgtggggtggtcgtgttttttgtttcttgttggtaggtggtgaatgcgtttttttcgttgttttctccgttactcaggctgccagttgcttggcagtcttgtcgctggctgtggacgctctgcacttcatcaccgtccccagctgcgctttgagccggtctaaggttgcccacagtattgacgttgggacccacgaaactggcaatttccatgtgtgcggccttacccagttctcccaaacttctgcgtataaccgcttctctgtgcttcagaaagataagtccggccccggcctcacacagcagctcagttcgtgacagcgtttaatatgtaaaatggagcaaataatttatagggcgttgggagagttaaagagactaattcatttacgtgttaaatacagggaatggcttttgcattgatataaccccagcctccagcatgcgccagacctgacgtaggtgttcggc

SEQ ID NO: 906 - DNA, 1087 bp, synthetic construct
  source 1..1087: mol_type = other DNA
cgcttcggtgtgtcacttcggccacagagggagacagacgattacggcccacggaaggccgcgtgagtctcgtgaagctggagatgcgctgggtctacctttcgccgtccgctccgccttggcagaggcgccgacacgcaccgaaggcagagaacccatctcgtatgggaccgcaccggacacgggcgcctgggccaggagcagagccgggccgtagaatagacatggccgtcgggggcggggcttcggaaggtttaaccaatccaaactgttgtattttgcatagccccaaagcattttggttaacagtaaaaacatcctaaatttaagtattttaatttaaacttagaacgaagcgagtataaaaaggattatttaaccctaaaacggattcaggatttgttataatatcaagtacagtcggctacataaggtcaccacatgtgtaaagttacaaaattctatggccttatatacctaccaagagcctgcttactctcaatgatagggacttagggtgatagaagtgcaaagcatgactgtcaaatttttggagcaggttttctgacttcggtcggaaaaccccttttgacccattacccatctaagttagatgcttttttaaatgttttttaatttttaaatttttaatttttttcattatttattttttatttttgagacggatctcggctcactgtaacctccacctcccgggttcaagcgattctcctgactcagcctcccgagtagctgggattacaggcgcgcgccaccatgcccggctaatttttctatttttagtaaagacggggtttcgccatgttgaccagggtggtcttgaactcctgacgtcaggtgatcctcctgcctcgtgctgggattgcaggcgtgagccaccgctcccggcccttagatgctttttaatcagcaagtacgcaatgctttcctgacaggaatgtcaagtccgtcaggaaatccacataagggtgttaagcaggcaaagtaccacatacagattaaaatcaaaagcactgtcaacgcttatttaatttatacagtagaccctaacttttctaattttgtg

SEQ ID NO: 907 - DNA, 1087 bp, synthetic construct
  source 1..1087: mol_type = other DNA
cgcttcggtgtgtcacttcggccacagagggagacagacgattacggcccacggaaggccgcgtgagtctcgtgaagctggagatgcgctgggtctacctttcgccgtccgctccgccttggcagaggcgccgacacgcaccgaaggcagagaacccatctcgtatgggaccgcaccggacacgggcgcctgggccaggagcagagccgggccgtagaatagacatggccgtcgggggcggggcttcggaaggtttaaccaatccaaactgttgtattttgcatagccccaaagcattttggttaacagtaaaaacatcctaaatttaagtattttaatttaaacttagaacgaagcgagtataaaaaggattatttaaccctaaaacggattcaggatttgttataatatcaagtacagtcggctacataaggtcaccacatgtgtaaagttacaaaattctatggccttatatacctaccaagagcctgcttactctcaatgatagggacttagggtgatagaagtgcaaagcatgactgtcaaatttttggagcaggttttctgacttcggtcggaaaacccctgtttacttggttttaaaaatagcttgcactagcgataccgcgaatatggttattaggtttgttaggcacagtcgtgtcttactatagaaaaataacgtagtgttcattttgctgcctgtatgtgttaatttgtccttattgcgccattgttcttgttaagtcttctgtaaggagttgcgggtttcaaactgtcagtctgagagcataagctcacttttcagtcagttgaattgaatgttacattcgattggttctggatattgatattacccaaggcttgtcctgtttgtaagtcttttcctacacctgacaatatgattatgtttacaatgtccctagaactctgggtgtatcgttcccactgaataaaatttgatctctaagttgacctataaatttaagtaccaaaaaactggtttgtaagattttggaaggcagaggcagggaagagaccaacgtggtctacatataaagtaccaggtacatataaagtaccaggt

SEQ ID NO: 908 - DNA, 1083 bp, synthetic construct
  source 1..1083: mol_type = other DNA
cgcttcggtgtgtcacttcggccacagagggagacagacgattacggcccacggaaggccgcgtgagtctcgtgaagctggagatgcgctgggtctacctttcgccgtccgctccgccttggcagaggcgccgacacgcaccgaaggcagagaacccatctcgtatgggaccgcaccggacacgggcgcctgggccaggagcagagccgggccgtagaatagacatggccgtcgggggcggggcttcggaaggtttaaccaatccaaactgttgtattttgcatagccccaaagcattttggttaacagtaaaaacatcctaaatttaagtattttaatttaaacttagaacgaagcgagtataaaaaggattatttaaccctaaaacggattcaggatttgttataatatcaagtacagtcggctacataaggtcaccacatgtgtaaagttacaaaattctatggccttatatacctaccaagagcctgcttactctcaatgatagggacttagggtgatagaagtgcaaagcatgactgtcaaatttttggagcaggttttctgacttcggtcggaaaacccctatttttgtggtgctaaaagttagattgcattccgcccttctcacgtctctttacgtgttgtttgcgaggcgtggcctcggaggtaaatggtctccttttacctcagataagcttacctttgctctgtgagtaagaatgtagctacacttccaaatttagctattgtcctttgcggtccaaatgaaaatattaccttccgatctaacaatgttaaactagtcccaggcccttctatcgattgccagaatagactagactactacacagacacaccctctcaaatcaggccagctcctgcaacctgcacctacagtttgtcccctgggacaaatgaaaggacaggccctctttcccccccccccccaaatcagagcacacacagatcttggggtctggggcagaaatttcgttcatggaaaaaacaaacaaacaaacaaacacgatcaaaggaagctcgttccctttggcctcagggtttcttagacgccgtgttccc

SEQ ID NO: 909 - DNA, 1084 bp, synthetic construct
  source 1..1084: mol_type = other DNA
cgcttcggtgtgtcacttcggccacagagggagacagacgattacggcccacggaaggccgcgtgagtctcgtgaagctggagatgcgctgggtctacctttcgccgtccgctccgccttggcagaggcgccgacacgcaccgaaggcagagaacccatctcgtatgggaccgcaccggacacgggcgcctgggccaggagcagagccgggccgtagaatagacatggccgtcgggggcggggcttcggaaggtttaaccaatccaaactgttgtattttgcatagccccaaagcattttggttaacagtaaaaacatcctaaatttaagtattttaatttaaacttagaacgaagcgagtataaaaaggattatttaaccctaaaacggattcaggatttgttataatatcaagtacagtcggctacataaggtcaccacatgtgtaaagttacaaaattctatggccttatatacctaccaagagcctgcttactctcaatgatagggacttagggtgatagaagtgcaaagcatgactgtcaaatttttggagcaggttttctgacttcggtcggaaaacccctataactggtaaccaaaagcagattactttcccccttgtggtcttcgcgtttgcggacgggagagaactttcggccattttccttttagaaatttaacttcttgaaggccaccaggtgacccttacttccctctcacctttccttctacctgtactttctctattaaaaagcctgcagaagtacccttgacaaattgccaaaaatgacacctaaaaaaaaaaaaaggaaaaacgacaccttaggtaattataggttgtaagaaaaagatttgacctcttggagtttttatttcttaataccaaaggacacccaaggaacgtatctctcaaaattgggtttcaaacctcagccgtttccttcttagttccagtgcttaacacgcaacagacctgcacaccactacactgcatacgagttttaaagttaataaatcagtcacccctccatagtcttctacctacttgaagacagaaacggctgctaggaagcaattcttc

SEQ ID NO: 910 - DNA, 1087 bp, synthetic construct
  source 1..1087: mol_type = other DNA
cgcttcggtgtgtcacttcggccacagagggagacagacgattacggcccacggaaggccgcgtgagtctcgtgaagctggagatgcgctgggtctacctttcgccgtccgctccgccttggcagaggcgccgacacgcaccgaaggcagagaacccatctcgtatgggaccgcaccggacacgggcgcctgggccaggagcagagccgggccgtagaatagacatggccgtcgggggcggggcttcggaaggtttaaccaatccaaactgttgtattttgcatagccccaaagcattttggttaacagtaaaaacatcctaaatttaagtattttaatttaaacttagaacgaagcgagtataaaaaggattatttaaccctaaaacggattcaggatttgttataatatcaagtacagtcggctacataaggtcaccacatgtgtaaagttacaaaattctatggccttatatacctaccaagagcctgcttactctcaatgatagggacttagggtgatagaagtgcaaagcatgactgtcaaatttttggagcaggttttctgacttcggtcggaaaacccctctggggaataagagtggtttaaagaaagaacaatttgagagatctgcttagatctaataaaacccaagtatagtttctttagacgtcttatatctcacgtaggacctcttatttcagactcactgcaagaacaagctaaagaactatatacagtcaggaacaaggtgagccatcgcggttctcagtcccatgatcttaagagtttttcctcttcccctcttccctggctgtcctggagctcactctgtagaccaggctggtctcaaactcagaaatccacttacctctgcctcccaagggctgggattaaaggcatgcaccaccattgcccggcagggtatgtggactatgctgtccttcaactcagagatcgtggtactttaaatctcattttccgaaagaaaagaaaagaaaggaaggggggaaataaagccagtatattttgcacccacaatctgaagttctacaaatattgttagaaaatgcaaaggacccaagtc

SEQ ID NO: 911 - DNA, 1087 bp, synthetic construct
  source 1..1087: mol_type = other DNA
cgcttcggtgtgtcacttcggccacagagggagacagacgattacggcccacggaaggccgcgtgagtctcgtgaagctggagatgcgctgggtctacctttcgccgtccgctccgccttggcagaggcgccgacacgcaccgaaggcagagaacccatctcgtatgggaccgcaccggacacgggcgcctgggccaggagcagagccgggccgtagaatagacatggccgtcgggggcggggcttcggaaggtttaaccaatccaaactgttgtattttgcatagccccaaagcattttggttaacagtaaaaacatcctaaatttaagtattttaatttaaacttagaacgaagcgagtataaaaaggattatttaaccctaaaacggattcaggatttgttataatatcaagtacagtcggctacataaggtcaccacatgtgtaaagttacaaaattctatggccttatatacctaccaagagcctgcttactctcaatgatagggacttagggtgatagaagtgcaaagcatgactgtcaaatttttggagcaggttttctgacttcggtcggaaaacccctctcggtttatcttaaagggttttaaatatagaaagcttccttagtcttatgggtgagagtgctgtttaagccttacctaggtatgtctttgaacatttattacagattgttatttgtgactatgaccactcaggtgttctgttcttgtgaatttagacacactcagaaaggctacacactcaaagaccacaccaaagtgaagtactatctgggccgtgaaactggtcacatatcagttattttgcagtaaaacaaggaagtcaatcatactgcttcagtgggtcagggagtcaagaatgcacagtacaagagctggtgagattcctcagcaggtaagagcactgaatgctcttccaaagattctgagttcaaatcccagcaaccacgtggtggatttgaacaaaggatgaaaacaaccatccataaccagatctgatgccctcttctggagtgtcaaaagacagctatggtgtacttacataaataaataagtaaaaaca

SEQ ID NO: 912 - DNA, 1087 bp, synthetic construct
  source 1..1087: mol_type = other DNA
cgcttcggtgtgtcacttcggccacagagggagacagacgattacggcccacggaaggccgcgtgagtctcgtgaagctggagatgcgctgggtctacctttcgccgtccgctccgccttggcagaggcgccgacacgcaccgaaggcagagaacccatctcgtatgggaccgcaccggacacgggcgcctgggccaggagcagagccgggccgtagaatagacatggccgtcgggggcggggcttcggaaggtttaaccaatccaaactgttgtattttgcatagccccaaagcattttggttaacagtaaaaacatcctaaatttaagtattttaatttaaacttagaacgaagcgagtataaaaaggattatttaaccctaaaacggattcaggatttgttataatatcaagtacagtcggctacataaggtcaccacatgtgtaaagttacaaaattctatggccttatatacctaccaagagcctgcttactctcaatgatagggacttagggtgatagaagtgcaaagcatgactgtcaaatttttggagcaggttttctgacttcggtcggaaaacccctccacattttgtgtttaaaaatagaaatatttaagtgagatcagtttaaatctgctttatctagggtgtctaactgcttgcatctttttaacttttccttatttgtgagaaggtctgtaaaacttattatatgttagtacactgtagctgtcttcagacactccagaagagggattcagatcaccttacagatggttttgagccaccatgtggttgctgggatttgaactcaggacctttagaaaagtagttgggtgctcttacccgctgagccatctcaccagccctttttttttcttttttccagttcgggtttctctgtgtgtagccctggctgtcctggaactcattctgtagaccgggctggcctcgaactcagaaatctgcctgcctctgcctcccaagtgctgggattaaaggaatgtgccttcattgcccggctctagggctttttgttgttgtttgtttgtttgtttgtttgtttgcttttgtggatggcct

SEQ ID NO: 913 - DNA, 1087 bp, synthetic construct
  source 1..1087: mol_type = other DNA
cgcttcggtgtgtcacttcggccacagagggagacagacgattacggcccacggaaggccgcgtgagtctcgtgaagctggagatgcgctgggtctacctttcgccgtccgctccgccttggcagaggcgccgacacgcaccgaaggcagagaacccatctcgtatgggaccgcaccggacacgggcgcctgggccaggagcagagccgggccgtagaatagacatggccgtcgggggcggggcttcggaaggtttaaccaatccaaactgttgtattttgcatagccccaaagcattttggttaacagtaaaaacatcctaaatttaagtattttaatttaaacttagaacgaagcgagtataaaaaggattatttaaccctaaaacggattcaggatttgttataatatcaagtacagtcggctacataaggtcaccacatgtgtaaagttacaaaattctatggccttatatacctaccaagagcctgcttactctcaatgatagggacttagggtgatagaagtgcaaagcatgactgtcaaatttttggagcaggttttctgacttcggtcggaaaacccctaaaaccagtaagggagaaaggtcaagtaacatataaaggaaggcctatcagaattacaccagacttttcaccagagactatgaaagccagaagagcctggacagatgttatacagacactaagagaacacaaatgccagcccaggctactatacctggccaaactctcaattaccatagatggagaaaccaaagtattccacgacaaaaacaaattcacacaatatctttccacgaatccagcccttcaaaggataatgacagaaaagaagcaatacaaggacggaaatcacgccctagaacaaccaagaaactaatcattcaacaaaccaaaaagaagacagccacaagaacagaatgccaactctaacaacaaaaataaaaggaagcaacaattacttttccttaatatctcttaatatcaatggactcaattccccaataaaaagacatagactaacagactggctacacaaacaggacccaacattctgctgctta

SEQ ID NO: 914 - DNA, 1087 bp, synthetic construct
  source 1..1087: mol_type = other DNA
cgcttcggtgtgtcacttcggccacagagggagacagacgattacggcccacggaaggccgcgtgagtctcgtgaagctggagatgcgctgggtctacctttcgccgtccgctccgccttggcagaggcgccgacacgcaccgaaggcagagaacccatctcgtatgggaccgcaccggacacgggcgcctgggccaggagcagagccgggccgtagaatagacatggccgtcgggggcggggcttcggaaggtttaaccaatccaaactgttgtattttgcatagccccaaagcattttggttaacagtaaaaacatcctaaatttaagtattttaatttaaacttagaacgaagcgagtataaaaaggattatttaaccctaaaacggattcaggatttgttataatatcaagtacagtcggctacataaggtcaccacatgtgtaaagttacaaaattctatggccttatatacctaccaagagcctgcttactctcaatgatagggacttagggtgatagaagtgcaaagcatgactgtcaaatttttggagcaggttttctgacttcggtcggaaaacccctcccaatttcactggtctacaatgaaagcaaaacagttctcttccccgctccccggtgtgtgagaggggctttgatccttctctggtttcctaggaaacgcgtatgtgctagagccacgctctgagacttccgcctcgtgcggtcccgcttcctttctgcctcctctggcctgcatccgtgggggaggtggctggctgcagggttctccggatctcttctgtgttcccactactcaagcaccgagtggcgttctatggcgtccgcctcggctcagcccgcggccctgagcgcggagcaggccaagggtgaggaaagagcctagtctgggtgtgggccgtcttctggggggagggcgcgatactattctttgcctctccaagtggggcccttgcccattagggcgaagggttgggaggacaagcttatcgggttgcttgcaggcctcggcccactaattccctgcctcttccctcctctgggctcgcccgccgtcctccgcg

SEQ ID NO: 915 - DNA, 1087 bp, synthetic construct
  source 1..1087: mol_type = other DNA
cgcttcggtgtgtcacttcggccacagagggagacagacgattacggcccacggaaggccgcgtgagtctcgtgaagctggagatgcgctgggtctacctttcgccgtccgctccgccttggcagaggcgccgacacgcaccgaaggcagagaacccatctcgtatgggaccgcaccggacacgggcgcctgggccaggagcagagccgggccgtagaatagacatggccgtcgggggcggggcttcggaaggtttaaccaatccaaactgttgtattttgcatagccccaaagcattttggttaacagtaaaaacatcctaaatttaagtattttaatttaaacttagaacgaagcgagtataaaaaggattatttaaccctaaaacggattcaggatttgttataatatcaagtacagtcggctacataaggtcaccacatgtgtaaagttacaaaattctatggccttatatacctaccaagagcctgcttactctcaatgatagggacttagggtgatagaagtgcaaagcatgactgtcaaatttttggagcaggttttctgacttcggtcggaaaacccctgaatttgttaaattacaggaggaagcttttttagttcattttacaaatactttcttgttaggtagataataccttctaaggttattatctggatcttctaagtctttttatcgctagcaagtctaagtttctggactttggaattagaagttaatgtcgtaggcgggcatggtggtccacgcctttaatcccagagtttgggaggcagacgcaggtggttttctgagttcgaggccatcctgctcttcaatgttagttccaggacagccagggttatacaaagaaaccctgtctcgagaaacaaaacaaacaaaaaaagagtagctgagtgctctgagttgtctctccagccccttagctatttattttcatttaaattatttttgttttattcgcttgtgtgcctgagtttgaatttcccgggattaacagttgaagactagggctggtgagatggctcagcggttaagattgccgactgctcttccaaaggtcctgag

SEQ ID NO: 916 - DNA, 1087 bp, synthetic construct
  source 1..1087: mol_type = other DNA
cgcttcggtgtgtcacttcggccacagagggagacagacgattacggcccacggaaggccgcgtgagtctcgtgaagctggagatgcgctgggtctacctttcgccgtccgctccgccttggcagaggcgccgacacgcaccgaaggcagagaacccatctcgtatgggaccgcaccggacacgggcgcctgggccaggagcagagccgggccgtagaatagacatggccgtcgggggcggggcttcggaaggtttaaccaatccaaactgttgtattttgcatagccccaaagcattttggttaacagtaaaaacatcctaaatttaagtattttaatttaaacttagaacgaagcgagtataaaaaggattatttaaccctaaaacggattcaggatttgttataatatcaagtacagtcggctacataaggtcaccacatgtgtaaagttacaaaattctatggccttatatacctaccaagagcctgcttactctcaatgatagggacttagggtgatagaagtgcaaagcatgactgtcaaatttttggagcaggttttctgacttcggtcggaaaacccctaccccctaattctacaagaatagaaagcttagcagctcctctgaatggttgctctcaggtgctagtggttgcaagtcgtatgttgatgcctgcctttgccctacctggtgtgtgagcgtgagcgcgccccacctctccagcctctctcttactgtttttcagacaagatgggactgttgttctcctactgctatgtacctcaatttcaattgatcatgcctggacataactgcccatgttgtaaggtcgtctacgttgtaaggtcgtgctcagtttctgatgcctagactagtcacctttccgtttgcctcctgactgtgtaaatgaggcaaatgaaggtggtctcttaactgacatgttagtgtttgacctatgggatagtttctcattgttgagacagaatttctagaagctggtccgctgagcggctaagagcacttgctgatattgcaaaggatctacctgggtttggttctcagcactcacatggaagttcacat

SEQ ID NO: 917 - DNA, 654 bp, synthetic construct
  source 1..654: mol_type = other DNA
cgcttcggtgtgtcacttcggccacagagggagacagacgattacggcccacggaaggccgcgtgagtctcgtgaagctggagatgcgctgggtctacctttcgccgtccgctccgccttggcagaggcgccgacacgcaccgaaggcagagaacccatctcgtatgggaccgcaccggacacgggcgcctgggccaggagcagagccgggccgtagaatagacatggccgtcgggggcggggcttcggaaggtttaaccaatccaaactgttgtattttgcatagccccaaagcattttggttaacagtaaaaacatcctaaatttaagtattttaatttaaacttagaacgaagcgagtataaaaaggattatttaaccctaaaacggattcaggatttgttataatatcaagtacagtcggctacataaggtcaccacatgtgtaaagttacaaaattctatggccttatatacctaccaagagcctgcttactctcaatgatagggacttagggtgatagaagtgcaaagcatgactgtcaaatttttggagcaggttttctgacttcggtcggaaaaccccttgtagttcctgcaatttaattttcgtttaaaactttattttattctttaacttaaaaaaaatatata

SEQ ID NO: 918 - skipped

SEQ ID NO: 919 - RNA, 87 nt, Homo sapiens
  source 1..87: mol_type = other RNA
aatgatagggacttagggtgagaaatattcctctaacattctacaaatttttggagcaggttttctgacttcggtcggaaaacccct

SEQ ID NO: 920 - RNA, 113 nt, Homo sapiens
  source 1..113: mol_type = other RNA
aatgatagggacttagggtgagataatggtcacaggcggaagggatcgaatcagagtcatgcggaggtgtaaatttttggagcaggttttctgacttcggtcggaaaacccct

SEQ ID NO: 921 - RNA, 93 nt, Homo sapiens
  source 1..93: mol_type = other RNA
aatgatagggacttagggtgaacattactttgaacttaacactactagaagaatttttggagcaggttttctgacttcggtcggaaaacccct

SEQ ID NO: 922 - RNA, 87 nt, Homo sapiens
  source 1..87: mol_type = other RNA
aatgatagggacttagggtgatagaagtgcaaagcatgactgtcaaatttttggagcaggttttctgacttcggtcggaaaacccct

SEQ ID NO: 923 - RNA, 82 nt, Mus musculus
  source 1..82: mol_type = unassigned RNA
atgatagggacttagggtgagcaccccatcccccactacaaatttttggagcaggttttctgacttcggtcggaaaacccct

SEQ ID NO: 924 - RNA, 82 nt, Mus musculus
  source 1..82: mol_type = unassigned RNA
atgatagggacttagggtgaaaccaccgctccaccccatcaatttttggagcaggttttctgacttcggtcggaaaacccct

SEQ ID NO: 925 - RNA, 82 nt, Mus musculus
  source 1..82: mol_type = unassigned RNA
atgatagggacttagggtgacaagttggagcaagattatcaatttttggagcaggttttctgacttcggtcggaaaacccct

SEQ ID NO: 926 - RNA, 82 nt, Mus musculus
  source 1..82: mol_type = unassigned RNA
atgatagggacttagggtgactatataaaatagaaatataaatttttggagcaggttttctgacttcggtcggaaaacccct

SEQ ID NO: 927 - RNA, 82 nt, Mus musculus
  source 1..82: mol_type = unassigned RNA
atgatagggacttagggtgatagtttattattagttagaaaatttttggagcaggttttctgacttcggtcggaaaacccct

SEQ ID NO: 928 - RNA, 86 nt, Mus musculus
  source 1..86: mol_type = unassigned RNA
atgatagggacttagggtgagaggaaccaccgctccaccccatcaatttttggagcaggttttctgacttcggtcggaaaacccct

SEQ ID NO: 929 - RNA, 86 nt, Mus musculus
  source 1..86: mol_type = unassigned RNA
atgatagggacttagggtgacatccaagttggagcaagattatcaatttttggagcaggttttctgacttcggtcggaaaacccct

SEQ ID NO: 930 - RNA, 86 nt, Mus musculus
  source 1..86: mol_type = unassigned RNA
atgatagggacttagggtgatatcctatataaaatagaaatataaatttttggagcaggttttctgacttcggtcggaaaacccct

SEQ ID NO: 931 - RNA, 86 nt, Mus musculus
  source 1..86: mol_type = unassigned RNA
atgatagggacttagggtgatatatagtttattattagttagaaaatttttggagcaggttttctgacttcggtcggaaaacccct

SEQ ID NO: 932 - RNA, 88 nt, Mus musculus
  source 1..88: mol_type = unassigned RNA
atgatagggacttagggtgagggaggaaccaccgctccaccccatcaatttttggagcaggttttctgacttcggtcggaaaacccct

SEQ ID NO: 933 - RNA, 88 nt, Mus musculus
  source 1..88: mol_type = unassigned RNA
atgatagggacttagggtgacccatccaagttggagcaagattatcaatttttggagcaggttttctgacttcggtcggaaaacccct

SEQ ID NO: 934 - RNA, 88 nt, Mus musculus
  source 1..88: mol_type = unassigned RNA
atgatagggacttagggtgaattatcctatataaaatagaaatataaatttttggagcaggttttctgacttcggtcggaaaacccct

SEQ ID NO: 935 - RNA, 88 nt, Mus musculus
  source 1..88: mol_type = unassigned RNA
atgatagggacttagggtgaaatatatagtttattattagttagaaaatttttggagcaggttttctgacttcggtcggaaaacccct

SEQ ID NO: 936 - RNA, 92 nt, Mus musculus
  source 1..92: mol_type = unassigned RNA
atgatagggacttagggtgatgaggggaggaaccaccgctccaccccatcaatttttggagcaggttttctgacttcggtcggaaaacccct

SEQ ID NO: 937 - RNA, 92 nt, Mus musculus
  source 1..92: mol_type = unassigned RNA
atgatagggacttagggtgaccaccccatccaagttggagcaagattatcaatttttggagcaggttttctgacttcggtcggaaaacccct

SEQ ID NO: 938 - RNA, 92 nt, Mus musculus
  source 1..92: mol_type = unassigned RNA
atgatagggacttagggtgacaagattatcctatataaaatagaaatataaatttttggagcaggttttctgacttcggtcggaaaacccct

SEQ ID NO: 939 - RNA, 92 nt, Mus musculus
  source 1..92: mol_type = unassigned RNA
atgatagggacttagggtgatagaaatatatagtttattattagttagaaaatttttggagcaggttttctgacttcggtcggaaaacccct

SEQ ID NO: 940 - RNA, 82 nt, Mus musculus
  source 1..82: mol_type = unassigned RNA
atgatagggacttagggtgaagtgcaaggattaaaggtagaatttttggagcaggttttctgacttcggtcggaaaacccct

SEQ ID NO: 941 - RNA, 82 nt, Mus musculus
  source 1..82: mol_type = unassigned RNA
atgatagggacttagggtgacaaaaggggtaatacagtacaatttttggagcaggttttctgacttcggtcggaaaacccct

SEQ ID NO: 942 - RNA, 82 nt, Mus musculus
  source 1..82: mol_type = unassigned RNA
atgatagggacttagggtgaccataataaagggctgagggaatttttggagcaggttttctgacttcggtcggaaaacccct

SEQ ID NO: 943 - RNA, 82 nt, Mus musculus
  source 1..82: mol_type = unassigned RNA
atgatagggacttagggtgagaggaaccaccgctccacccaatttttggagcaggttttctgacttcggtcggaaaacccct

SEQ ID NO: 944 - RNA, 86 nt, Mus musculus
  source 1..86: mol_type = unassigned RNA
atgatagggacttagggtgatcacagtgcaaggattaaaggtagaatttttggagcaggttttctgacttcggtcggaaaacccct

SEQ ID NO: 945 - RNA, 86 nt, Mus musculus
  source 1..86: mol_type = unassigned RNA
atgatagggacttagggtgagtagcaaaaggggtaatacagtacaatttttggagcaggttttctgacttcggtcggaaaacccct

SEQ ID NO: 946 - RNA, 86 nt, Mus musculus
  source 1..86: mol_type = unassigned RNA
atgatagggacttagggtgagtacccataataaagggctgagggaatttttggagcaggttttctgacttcggtcggaaaacccct

SEQ ID NO: 947 - RNA, 86 nt, Mus musculus
  source 1..86: mol_type = unassigned RNA
atgatagggacttagggtgaaggggaggaaccaccgctccacccaatttttggagcaggttttctgacttcggtcggaaaacccct

SEQ ID NO: 948 - RNA, 88 nt, Mus musculus
  source 1..88: mol_type = unassigned RNA
atgatagggacttagggtgaagtcacagtgcaaggattaaaggtagaatttttggagcaggttttctgacttcggtcggaaaacccct

SEQ ID NO: 949 - RNA, 88 nt, Mus musculus
  source 1..88: mol_type = unassigned RNA
atgatagggacttagggtgaaggtagcaaaaggggtaatacagtacaatttttggagcaggttttctgacttcggtcggaaaacccct

SEQ ID NO: 950 - RNA, 88 nt, Mus musculus
  source 1..88: mol_type = unassigned RNA
atgatagggacttagggtgacagtacccataataaagggctgagggaatttttggagcaggttttctgacttcggtcggaaaacccct

SEQ ID NO: 951 - RNA, 88 nt, Mus musculus
  source 1..88: mol_type = unassigned RNA
atgatagggacttagggtgatgaggggaggaaccaccgctccacccaatttttggagcaggttttctgacttcggtcggaaaacccct

SEQ ID NO: 952 - RNA, 92 nt, Mus musculus
  source 1..92: mol_type = unassigned RNA
atgatagggacttagggtgacataagtcacagtgcaaggattaaaggtagaatttttggagcaggttttctgacttcggtcggaaaacccct

SEQ ID NO: 953 - RNA, 92 nt, Mus musculus
  source 1..92: mol_type = unassigned RNA
atgatagggacttagggtgattaaaggtagcaaaaggggtaatacagtacaatttttggagcaggttttctgacttcggtcggaaaacccct

SEQ ID NO: 954 - RNA, 92 nt, Mus musculus
  source 1..92: mol_type = unassigned RNA
atgatagggacttagggtgaaatacagtacccataataaagggctgagggaatttttggagcaggttttctgacttcggtcggaaaacccct

SEQ ID NO: 955 - RNA, 92 nt, Mus musculus
  source 1..92: mol_type = unassigned RNA
atgatagggacttagggtgagggctgaggggaggaaccaccgctccacccaatttttggagcaggttttctgacttcggtcggaaaacccct

SEQ ID NO: 956 - RNA, 82 nt, Mus musculus
  source 1..82: mol_type = unassigned RNA
tttgttccgtgggtggtttaaaccaccgctccaccccatcaatttttggagcaggttttctgacttcggtcggaaaacccct

SEQ ID NO: 957 - RNA, 82 nt, Mus musculus
  source 1..82: mol_type = unassigned RNA
tttgttccgtgggtggtttacaagttggagcaagattatcaatttttggagcaggttttctgacttcggtcggaaaacccct

SEQ ID NO: 958 - RNA, 82 nt, Mus musculus
  source 1..82: mol_type = unassigned RNA
tttgttccgtgggtggtttactatataaaatagaaatataaatttttggagcaggttttctgacttcggtcggaaaacccct

SEQ ID NO: 959 - RNA, 82 nt, Mus musculus
  source 1..82: mol_type = unassigned RNA
tttgttccgtgggtggtttatagtttattattagttagaaaatttttggagcaggttttctgacttcggtcggaaaacccct

SEQ ID NO: 960 - RNA, 86 nt, Mus musculus
  source 1..86: mol_type = unassigned RNA
tttgttccgtgggtggtttagaggaaccaccgctccaccccatcaatttttggagcaggttttctgacttcggtcggaaaacccct

SEQ ID NO: 961 - RNA, 86 nt, Mus musculus
  source 1..86: mol_type = unassigned RNA
tttgttccgtgggtggtttacatccaagttggagcaagattatcaatttttggagcaggttttctgacttcggtcggaaaacccct

SEQ ID NO: 962 - RNA, 86 nt, Mus musculus
  source 1..86: mol_type = unassigned RNA
tttgttccgtgggtggtttatatcctatataaaatagaaatataaatttttggagcaggttttctgacttcggtcggaaaacccct

SEQ ID NO: 963 - RNA, 86 nt, Mus musculus
  source 1..86: mol_type = unassigned RNA
tttgttccgtgggtggtttatatatagtttattattagttagaaaatttttggagcaggttttctgacttcggtcggaaaacccct

SEQ ID NO: 964 - RNA, 88 nt, Mus musculus
  source 1..88: mol_type = unassigned RNA
tttgttccgtgggtggtttagggaggaaccaccgctccaccccatcaatttttggagcaggttttctgacttcggtcggaaaacccct

SEQ ID NO: 965 - RNA, 82 nt, Mus musculus
  source 1..82: mol_type = unassigned RNA
tttgttccgtgggtggtttaggagaatcaccttataggataatttttggagcaggttttctgacttcggtcggaaaacccct

SEQ ID NO: 966 - RNA, 88 nt, Mus musculus
  source 1..88: mol_type = unassigned RNA
tttgttccgtgggtggtttacccatccaagttggagcaagattatcaatttttggagcaggttttctgacttcggtcggaaaacccct

SEQ ID NO: 967 - RNA, 88 nt, Mus musculus
  source 1..88: mol_type = unassigned RNA
tttgttccgtgggtggtttaattatcctatataaaatagaaatataaatttttggagcaggttttctgacttcggtcggaaaacccct

SEQ ID NO: 968 - RNA, 88 nt, Mus musculus
  source 1..88: mol_type = unassigned RNA
tttgttccgtgggtggtttaaatatatagtttattattagttagaaaatttttggagcaggttttctgacttcggtcggaaaacccct

SEQ ID NO: 969 - RNA, 92 nt, Mus musculus
  source 1..92: mol_type = unassigned RNA
tttgttccgtgggtggtttatgaggggaggaaccaccgctccaccccatcaatttttggagcaggttttctgacttcggtcggaaaacccct

SEQ ID NO: 970 - RNA, 92 nt, Mus musculus
  source 1..92: mol_type = unassigned RNA
tttgttccgtgggtggtttaccaccccatccaagttggagcaagattatcaatttttggagcaggttttctgacttcggtcggaaaacccct

SEQ ID NO: 971 - RNA, 92 nt, Mus musculus
  source 1..92: mol_type = unassigned RNA
tttgttccgtgggtggtttacaagattatcctatataaaatagaaatataaatttttggagcaggttttctgacttcggtcggaaaacccct

SEQ ID NO: 972 - RNA, 92 nt, Mus musculus
  source 1..92: mol_type = unassigned RNA
tttgttccgtgggtggtttatagaaatatatagtttattattagttagaaaatttttggagcaggttttctgacttcggtcggaaaacccct

SEQ ID NO: 973 - RNA, 82 nt, Mus musculus
  source 1..82: mol_type = unassigned RNA
tttgttccgtgggtggtttaagtgcaaggattaaaggtagaatttttggagcaggttttctgacttcggtcggaaaacccct

SEQ ID NO: 974 - RNA, 82 nt, Mus musculus
  source 1..82: mol_type = unassigned RNA
tttgttccgtgggtggtttacaaaaggggtaatacagtacaatttttggagcaggttttctgacttcggtcggaaaacccct

SEQ ID NO: 975 - RNA, 82 nt, Mus musculus
  source 1..82: mol_type = unassigned RNA
tttgttccgtgggtggtttaccataataaagggctgagggaatttttggagcaggttttctgacttcggtcggaaaacccct

SEQ ID NO: 976 - RNA, 82 nt, Mus musculus
  source 1..82: mol_type = unassigned RNA
tttgttccgtgggtggtttagaggaaccaccgctccacccaatttttggagcaggttttctgacttcggtcggaaaacccct

SEQ ID NO: 977 - RNA, 82 nt, Mus musculus
  source 1..82: mol_type = unassigned RNA
tttgttccgtgggtggtttagaataataacataataatataatttttggagcaggttttctgacttcggtcggaaaacccct

SEQ ID NO: 978 - RNA, 86 nt, Mus musculus
  source 1..86: mol_type = unassigned RNA
tttgttccgtgggtggtttatcacagtgcaaggattaaaggtagaatttttggagcaggttttctgacttcggtcggaaaacccct

SEQ ID NO: 979 - RNA, 86 nt, Mus musculus
  source 1..86: mol_type = unassigned RNA
tttgttccgtgggtggtttagtagcaaaaggggtaatacagtacaatttttggagcaggttttctgacttcggtcggaaaacccct

SEQ ID NO: 980 - RNA, 86 nt, Mus musculus
  source 1..86: mol_type = unassigned RNA
tttgttccgtgggtggtttagtacccataataaagggctgagggaatttttggagcaggttttctgacttcggtcggaaaacccct

SEQ ID NO: 981 - RNA, 86 nt, Mus musculus
  source 1..86: mol_type = unassigned RNA
tttgttccgtgggtggtttaaggggaggaaccaccgctccacccaatttttggagcaggttttctgacttcggtcggaaaacccct

SEQ ID NO: 982 - RNA, 88 nt, Mus musculus
  source 1..88: mol_type = unassigned RNA
tttgttccgtgggtggtttaagtcacagtgcaaggattaaaggtagaatttttggagcaggttttctgacttcggtcggaaaacccct

SEQ ID NO: 983 - RNA, 88 nt, Mus musculus
  source 1..88: mol_type = unassigned RNA
tttgttccgtgggtggtttaaggtagcaaaaggggtaatacagtacaatttttggagcaggttttctgacttcggtcggaaaacccct

SEQ ID NO: 984 - RNA, 88 nt, Mus musculus
  source 1..88: mol_type = unassigned RNA
tttgttccgtgggtggtttacagtacccataataaagggctgagggaatttttggagcaggttttctgacttcggtcggaaaacccct

SEQ ID NO: 985 - RNA, 88 nt, Mus musculus
  source 1..88: mol_type = unassigned RNA
tttgttccgtgggtggtttatgaggggaggaaccaccgctccacccaatttttggagcaggttttctgacttcggtcggaaaacccct

SEQ ID NO: 986 - RNA, 92 nt, Mus musculus
  source 1..92: mol_type = unassigned RNA
tttgttccgtgggtggtttacataagtcacagtgcaaggattaaaggtagaatttttggagcaggttttctgacttcggtcggaaaacccct

SEQ ID NO: 987 - RNA, 92 nt, Mus musculus
  source 1..92: mol_type = unassigned RNA
tttgttccgtgggtggtttattaaaggtagcaaaaggggtaatacagtacaatttttggagcaggttttctgacttcggtcggaaaacccct

SEQ ID NO: 988 - RNA, 92 nt, Mus musculus
  source 1..92: mol_type = unassigned RNA
tttgttccgtgggtggtttaaatacagtacccataataaagggctgagggaatttttggagcaggttttctgacttcggtcggaaaacccct

SEQ ID NO: 989 - RNA, 92 nt, Mus musculus
  source 1..92: mol_type = unassigned RNA
tttgttccgtgggtggtttagggctgaggggaggaaccaccgctccacccaatttttggagcaggttttctgacttcggtcggaaaacccct

SEQ ID NO: 990 - RNA, 82 nt, Mus musculus
  source 1..82: mol_type = unassigned RNA
tggggggaggtaggtaggtaaaccaccgctccaccccatcaatttttggagcaggttttctgacttcggtcggaaaacccct

SEQ ID NO: 991 - RNA, 82 nt, Mus musculus
  source 1..82: mol_type = unassigned RNA
tggggggaggtaggtaggtacaagttggagcaagattatcaatttttggagcaggttttctgacttcggtcggaaaacccct

SEQ ID NO: 992 - RNA, 82 nt, Mus musculus
  source 1..82: mol_type = unassigned RNA
tggggggaggtaggtaggtactatataaaatagaaatataaatttttggagcaggttttctgacttcggtcggaaaacccct

SEQ ID NO: 993 - RNA, 82 nt, Mus musculus
  source 1..82: mol_type = unassigned RNA
tggggggaggtaggtaggtatagtttattattagttagaaaatttttggagcaggttttctgacttcggtcggaaaacccct

SEQ ID NO: 994 - RNA, 86 nt, Mus musculus
  source 1..86: mol_type = unassigned RNA
tggggggaggtaggtaggtagaggaaccaccgctccaccccatcaatttttggagcaggttttctgacttcggtcggaaaacccct

SEQ ID NO: 995 - RNA, 86 nt, Mus musculus
  source 1..86: mol_type = unassigned RNA
tggggggaggtaggtaggtacatccaagttggagcaagattatcaatttttggagcaggttttctgacttcggtcggaaaacccct

SEQ ID NO: 996 - RNA, 86 nt, Mus musculus
  source 1..86: mol_type = unassigned RNA
tggggggaggtaggtaggtatatcctatataaaatagaaatataaatttttggagcaggttttctgacttcggtcggaaaacccct

SEQ ID NO: 997 - RNA, 86 nt, Mus musculus
  source 1..86: mol_type = unassigned RNA
tggggggaggtaggtaggtatatatagtttattattagttagaaaatttttggagcaggttttctgacttcggtcggaaaacccct

SEQ ID NO: 998 - RNA, 88 nt, Mus musculus
  source 1..88: mol_type = unassigned RNA
tggggggaggtaggtaggtagggaggaaccaccgctccaccccatcaatttttggagcaggttttctgacttcggtcggaaaacccct

SEQ ID NO: 999 - RNA, 88 nt, Mus musculus
  source 1..88: mol_type = unassigned RNA
tggggggaggtaggtaggtacccatccaagttggagcaagattatcaatttttggagcaggttttctgacttcggtcggaaaacccct

SEQ ID NO: 1000 - RNA, 88 nt, Mus musculus
  source 1..88: mol_type = unassigned RNA
tggggggaggtaggtaggtaattatcctatataaaatagaaatataaatttttggagcaggttttctgacttcggtcggaaaacccct

SEQ ID NO: 1001 - RNA, 92 nt, Mus musculus
  source 1..92: mol_type = unassigned RNA
tggggggaggtaggtaggtatgaggggaggaaccaccgctccaccccatcaatttttggagcaggttttctgacttcggtcggaaaacccct

SEQ ID NO: 1002 - RNA, 92 nt, Mus musculus
  source 1..92: mol_type = unassigned RNA
tggggggaggtaggtaggtaccaccccatccaagttggagcaagattatcaatttttggagcaggttttctgacttcggtcggaaaacccct

SEQ ID NO: 1003 - RNA, 92 nt, Mus musculus
  source 1..92: mol_type = unassigned RNA
tggggggaggtaggtaggtacaagattatcctatataaaatagaaatataaatttttggagcaggttttctgacttcggtcggaaaacccct

SEQ ID NO: 1004 - RNA, 82 nt, Mus musculus
  source 1..82: mol_type = unassigned RNA
tggggggaggtaggtaggtaagtgcaaggattaaaggtagaatttttggagcaggttttctgacttcggtcggaaaacccct

SEQ ID NO: 1005 - RNA, 82 nt, Mus musculus
  source 1..82: mol_type = unassigned RNA
tggggggaggtaggtaggtacaaaaggggtaatacagtacaatttttggagcaggttttctgacttcggtcggaaaacccct

SEQ ID NO: 1006 - RNA, 82 nt, Mus musculus
  source 1..82: mol_type = unassigned RNA
tggggggaggtaggtaggtaccataataaagggctgagggaatttttggagcaggttttctgacttcggtcggaaaacccct

SEQ ID NO: 1007 - RNA, 82 nt, Mus musculus
  source 1..82: mol_type = unassigned RNA
tggggggaggtaggtaggtagaggaaccaccgctccacccaatttttggagcaggttttctgacttcggtcggaaaacccct

SEQ ID NO: 1008 - RNA, 86 nt, Mus musculus
  source 1..86: mol_type = unassigned RNA
tggggggaggtaggtaggtatcacagtgcaaggattaaaggtagaatttttggagcaggttttctgacttcggtcggaaaacccct

SEQ ID NO: 1009 - RNA, 86 nt, Mus musculus
  source 1..86: mol_type = unassigned RNA
tggggggaggtaggtaggtagtagcaaaaggggtaatacagtacaatttttggagcaggttttctgacttcggtcggaaaacccct

SEQ ID NO: 1010 - RNA, 86 nt, Mus musculus
  source 1..86: mol_type = unassigned RNA
tggggggaggtaggtaggtagtacccataataaagggctgagggaatttttggagcaggttttctgacttcggtcggaaaacccct

SEQ ID NO: 1011 - RNA, 86 nt, Mus musculus
  source 1..86: mol_type = unassigned RNA
tggggggaggtaggtaggtaaggggaggaaccaccgctccacccaatttttggagcaggttttctgacttcggtcggaaaacccct

SEQ ID NO: 1012 - RNA, 88 nt, Mus musculus
  source 1..88: mol_type = unassigned RNA
tggggggaggtaggtaggtaagtcacagtgcaaggattaaaggtagaatttttggagcaggttttctgacttcggtcggaaaacccct

SEQ ID NO: 1013 - RNA, 88 nt, Mus musculus
  source 1..88: mol_type = unassigned RNA
tggggggaggtaggtaggtaaggtagcaaaaggggtaatacagtacaatttttggagcaggttttctgacttcggtcggaaaacccct

SEQ ID NO: 1014 - RNA, 88 nt, Mus musculus
  source 1..88: mol_type = unassigned RNA
tggggggaggtaggtaggtacagtacccataataaagggctgagggaatttttggagcaggttttctgacttcggtcggaaaacccct

SEQ ID NO: 1015 - RNA, 92 nt, Mus musculus
  source 1..92: mol_type = unassigned RNA
tggggggaggtaggtaggtacataagtcacagtgcaaggattaaaggtagaatttttggagcaggttttctgacttcggtcggaaaacccct

SEQ ID NO: 1016 - RNA, 92 nt, Mus musculus
  source 1..92: mol_type = unassigned RNA
tggggggaggtaggtaggtattaaaggtagcaaaaggggtaatacagtacaatttttggagcaggttttctgacttcggtcggaaaacccct

SEQ ID NO: 1017 - RNA, 92 nt, Mus musculus
  source 1..92: mol_type = unassigned RNA
tggggggaggtaggtaggtaaatacagtacccataataaagggctgagggaatttttggagcaggttttctgacttcggtcggaaaacccct

SEQ ID NO: 1018 - RNA, 82 nt, Mus musculus
  source 1..82: mol_type = unassigned RNA
tggggggaggtaggtaggtagaaatttatgtattgattataatttttggagcaggttttctgacttcggtcggaaaacccct

SEQ ID NO: 1019 - RNA, 82 nt, Homo sapiens
  source 1..82: mol_type = unassigned RNA
atgatagggacttagggtgaaaccagcgctccaccccatcaatttttggagcaggttttctgacttcggtcggaaaacccct

SEQ ID NO: 1020 - RNA, 82 nt, Homo sapiens; identical to SEQ ID NO: 925
  source 1..82: mol_type = unassigned RNA

SEQ ID NO: 1021 - RNA, 82 nt, Homo sapiens
  source 1..82: mol_type = unassigned RNA
atgatagggacttagggtgactatacaaaatagaaatataaatttttggagcaggttttctgacttcggtcggaaaacccct

SEQ ID NO: 1022 - RNA, 82 nt, Homo sapiens
  source 1..82: mol_type = unassigned RNA
atgatagggacttagggtgatagtttgttattagttagaaaatttttggagcaggttttctgacttcggtcggaaaacccct

SEQ ID NO: 1023 - RNA, 86 nt, Homo sapiens
  source 1..86: mol_type = unassigned RNA
atgatagggacttagggtgagaggaaccagcgctccaccccatcaatttttggagcaggttttctgacttcggtcggaaaacccct

SEQ ID NO: 1024 - RNA, 86 nt, Homo sapiens; identical to SEQ ID NO: 929
  source 1..86: mol_type = unassigned RNA

SEQ ID NO: 1025 - RNA, 86 nt, Homo sapiens
  source 1..86: mol_type = unassigned RNA
atgatagggacttagggtgatatcctatacaaaatagaaatataaatttttggagcaggttttctgacttcggtcggaaaacccct

SEQ ID NO: 1026 - RNA, 86 nt, Homo sapiens
  source 1..86: mol_type = unassigned RNA
atgatagggacttagggtgatatatagtttgttattagttagaaaatttttggagcaggttttctgacttcggtcggaaaacccct

SEQ ID NO: 1027 - RNA, 88 nt, Homo sapiens
  source 1..88: mol_type = unassigned RNA
atgatagggacttagggtgagggaggaaccagcgctccaccccatcaatttttggagcaggttttctgacttcggtcggaaaacccct

SEQ ID NO: 1028 - RNA, 88 nt, Homo sapiens; identical to SEQ ID NO: 933
  source 1..88: mol_type = unassigned RNA

SEQ ID NO: 1029 - RNA, 88 nt, Homo sapiens
  source 1..88: mol_type = unassigned RNA
atgatagggacttagggtgaattatcctatacaaaatagaaatataaatttttggagcaggttttctgacttcggtcggaaaacccct

SEQ ID NO: 1030 - RNA, 88 nt, Homo sapiens
  source 1..88: mol_type = unassigned RNA
atgatagggacttagggtgaaatatatagtttgttattagttagaaaatttttggagcaggttttctgacttcggtcggaaaacccct

SEQ ID NO: 1031 - RNA, 92 nt, Homo sapiens
  source 1..92: mol_type = unassigned RNA
atgatagggacttagggtgatcaggggaggaaccagcgctccaccccatcaatttttggagcaggttttctgacttcggtcggaaaacccct

SEQ ID NO: 1032 - RNA, 92 nt, Homo sapiens; identical to SEQ ID NO: 937
  source 1..92: mol_type = unassigned RNA

SEQ ID NO: 1033 - RNA, 92 nt, Homo sapiens
  source 1..92: mol_type = unassigned RNA
atgatagggacttagggtgacaagattatcctatacaaaatagaaatataaatttttggagcaggttttctgacttcggtcggaaaacccct

SEQ ID NO: 1034 - RNA, 92 nt, Homo sapiens
  source 1..92: mol_type = unassigned RNA
atgatagggacttagggtgatagaaatatatagtttgttattagttagaaaatttttggagcaggttttctgacttcggtcggaaaacccct

SEQ ID NO: 1035 - RNA, 82 nt, Homo sapiens; identical to SEQ ID NO: 940
  source 1..82: mol_type = unassigned RNA

SEQ ID NO: 1036 - RNA, 82 nt, Homo sapiens; identical to SEQ ID NO: 941
  source 1..82: mol_type = unassigned RNA

SEQ ID NO: 1037 - RNA, 82 nt, Homo sapiens
  source 1..82: mol_type = unassigned RNA
atgatagggacttagggtgaccataataaagggctcagggaatttttggagcaggttttctgacttcggtcggaaaacccct

SEQ ID NO: 1038 - RNA, 82 nt, Homo sapiens
  source 1..82: mol_type = unassigned RNA
atgatagggacttagggtgagaggaaccagcgctccacccaatttttggagcaggttttctgacttcggtcggaaaacccct

SEQ ID NO: 1039 - RNA, 86 nt, Homo sapiens; identical to SEQ ID NO: 944
  source 1..86: mol_type = unassigned RNA

SEQ ID NO: 1040 - RNA, 86 nt, Homo sapiens; identical to SEQ ID NO: 945
  source 1..86: mol_type = unassigned RNA

SEQ ID NO: 1041 - RNA, 86 nt, Homo sapiens
  source 1..86: mol_type = unassigned RNA
atgatagggacttagggtgagtacccataataaagggctcagggaatttttggagcaggttttctgacttcggtcggaaaacccct

SEQ ID NO: 1042 - RNA, 86 nt, Homo sapiens
  source 1..86: mol_type = unassigned RNA
atgatagggacttagggtgaaggggaggaaccagcgctccacccaatttttggagcaggttttctgacttcggtcggaaaacccct

SEQ ID NO: 1043 - RNA, 88 nt, Homo sapiens; identical to SEQ ID NO: 948
  source 1..88: mol_type = unassigned RNA

SEQ ID NO: 1044 - RNA, 88 nt, Homo sapiens; identical to SEQ ID NO: 949
  source 1..88: mol_type = unassigned RNA

SEQ ID NO: 1045 - RNA, 88 nt, Homo sapiens
  source 1..88: mol_type = unassigned RNA
atgatagggacttagggtgacagtacccataataaagggctcagggaatttttggagcaggttttctgacttcggtcggaaaacccct

SEQ ID NO: 1046 - RNA, 88 nt, Homo sapiens
  source 1..88: mol_type = unassigned RNA
atgatagggacttagggtgatcaggggaggaaccagcgctccacccaatttttggagcaggttttctgacttcggtcggaaaacccct

SEQ ID NO: 1047 - RNA, 92 nt, Homo sapiens; identical to SEQ ID NO: 952
  source 1..92: mol_type = unassigned RNA

SEQ ID NO: 1048 - RNA, 92 nt, Homo sapiens; identical to SEQ ID NO: 953
  source 1..92: mol_type = unassigned RNA

SEQ ID NO: 1049 - RNA, 92 nt, Homo sapiens
  source 1..92: mol_type = unassigned RNA
atgatagggacttagggtgaaatacagtacccataataaagggctcagggaatttttggagcaggttttctgacttcggtcggaaaacccct

SEQ ID NO: 1050 - RNA, 92 nt, Homo sapiens
  source 1..92: mol_type = unassigned RNA
atgatagggacttagggtgagggctcaggggaggaaccagcgctccacccaatttttggagcaggttttctgacttcggtcggaaaacccct

SEQ ID NO: 1051 - RNA, 82 nt, Homo sapiens; identical to SEQ ID NO: 1019
  source 1..82: mol_type = unassigned RNA

SEQ ID NO: 1052 - RNA, 82 nt, Homo sapiens; identical to SEQ ID NO: 957
  source 1..82: mol_type = unassigned RNA

SEQ ID NO: 1053 - RNA, 82 nt, Homo sapiens
  source 1..82: mol_type = unassigned RNA
tttgttccgtgggtggtttactatacaaaatagaaatataaatttttggagcaggttttctgacttcggtcggaaaacccct

SEQ ID NO: 1054 - RNA, 82 nt, Homo sapiens
  source 1..82: mol_type = unassigned RNA
tttgttccgtgggtggtttatagtttgttattagttagaaaatttttggagcaggttttctgacttcggtcggaaaacccct

SEQ ID NO: 1055 - RNA, 86 nt, Homo sapiens
  source 1..86: mol_type = unassigned RNA
tttgttccgtgggtggtttagaggaaccagcgctccaccccatcaatttttggagcaggttttctgacttcggtcggaaaacccct

SEQ ID NO: 1056 - RNA, 86 nt, Homo sapiens; identical to SEQ ID NO: 961
  source 1..86: mol_type = unassigned RNA

SEQ ID NO: 1057 - RNA, 86 nt, Homo sapiens
  source 1..86: mol_type = unassigned RNA
tttgttccgtgggtggtttatatcctatacaaaatagaaatataaatttttggagcaggttttctgacttcggtcggaaaacccct

SEQ ID NO: 1058 - RNA, 86 nt, Homo sapiens
  source 1..86: mol_type = unassigned RNA
tttgttccgtgggtggtttatatatagtttgttattagttagaaaatttttggagcaggttttctgacttcggtcggaaaacccct

SEQ ID NO: 1059 - RNA, 88 nt, Homo sapiens
  source 1..88: mol_type = unassigned RNA
tttgttccgtgggtggtttagggaggaaccagcgctccaccccatcaatttttggagcaggttttctgacttcggtcggaaaacccct

SEQ ID NO: 1060 - RNA, 88 nt, Homo sapiens; identical to SEQ ID NO: 966
  source 1..88: mol_type = unassigned RNA

SEQ ID NO: 1061 - RNA, 88 nt, Homo sapiens
  source 1..88: mol_type = unassigned RNA
tttgttccgtgggtggtttaattatcctatacaaaatagaaatataaatttttggagcaggttttctgacttcggtcggaaaacccct

SEQ ID NO: 1062 - RNA, 88 nt, Homo sapiens
  source 1..88: mol_type = unassigned RNA
tttgttccgtgggtggtttaaatatatagtttgttattagttagaaaatttttggagcaggttttctgacttcggtcggaaaacccct

SEQ ID NO: 1063 - RNA, 92 nt, Homo sapiens
  source 1..92: mol_type = unassigned RNA
tttgttccgtgggtggtttatcaggggaggaaccagcgctccaccccatcaatttttggagcaggttttctgacttcggtcggaaaacccct

SEQ ID NO: 1064 - RNA, 92 nt, Homo sapiens; identical to SEQ ID NO: 970
  source 1..92: mol_type = unassigned RNA

SEQ ID NO: 1065 - RNA, 92 nt, Homo sapiens
  source 1..92: mol_type = unassigned RNA
tttgttccgtgggtggtttacaagattatcctatacaaaatagaaatataaatttttggagcaggttttctgacttcggtcggaaaacccct

SEQ ID NO: 1066 - RNA, 92 nt, Homo sapiens
  source 1..92: mol_type = unassigned RNA
tttgttccgtgggtggtttatagaaatatatagtttgttattagttagaaaatttttggagcaggttttctgacttcggtcggaaaacccct

SEQ ID NO: 1067 - RNA, 82 nt, Homo sapiens; identical to SEQ ID NO: 973
  source 1..82: mol_type = unassigned RNA

SEQ ID NO: 1068 - RNA, 82 nt, Homo sapiens; identical to SEQ ID NO: 974
  source 1..82: mol_type = unassigned RNA

SEQ ID NO: 1069 - RNA, 82 nt, Homo sapiens
  source 1..82: mol_type = unassigned RNA
tttgttccgtgggtggtttaccataataaagggctcagggaatttttggagcaggttttctgacttcggtcggaaaacccct

SEQ ID NO: 1070 - RNA, 82 nt, Homo sapiens
  source 1..82: mol_type = unassigned RNA
tttgttccgtgggtggtttagaggaaccagcgctccacccaatttttggagcaggttttctgacttcggtcggaaaacccct

SEQ ID NO: 1071 - RNA, 86 nt, Homo sapiens; identical to SEQ ID NO: 978
  source 1..86: mol_type = unassigned RNA

SEQ ID NO: 1072 - RNA, 86 nt, Homo sapiens; identical to SEQ ID NO: 979
  source 1..86: mol_type = unassigned RNA

SEQ ID NO: 1073 - RNA, 86 nt, Homo sapiens
  source 1..86: mol_type = unassigned RNA
tttgttccgtgggtggtttagtacccataataaagggctcagggaatttttggagcaggttttctgacttcggtcggaaaacccct

SEQ ID NO: 1074 - RNA, 86 nt, Homo sapiens
  source 1..86: mol_type = unassigned RNA
tttgttccgtgggtggtttaaggggaggaaccagcgctccacccaatttttggagcaggttttctgacttcggtcggaaaacccct

SEQ ID NO: 1075 - RNA, 88 nt, Homo sapiens; identical to SEQ ID NO: 982
  source 1..88: mol_type = unassigned RNA

SEQ ID NO: 1076 - RNA, 88 nt, Homo sapiens; identical to SEQ ID NO: 983
  source 1..88: mol_type = unassigned RNA

SEQ ID NO: 1077 - RNA, 88 nt, Homo sapiens
  source 1..88: mol_type = unassigned RNA
tttgttccgtgggtggtttacagtacccataataaagggctcagggaatttttggagcaggttttctgacttcggtcggaaaacccct

SEQ ID NO: 1078 - RNA, 88 nt, Homo sapiens
  source 1..88: mol_type = unassigned RNA
tttgttccgtgggtggtttatcaggggaggaaccagcgctccacccaatttttggagcaggttttctgacttcggtcggaaaacccct

SEQ ID NO: 1079 - RNA, 92 nt, Homo sapiens; identical to SEQ ID NO: 986
  source 1..92: mol_type = unassigned RNA

SEQ ID NO: 1080 - RNA, 92 nt, Homo sapiens; identical to SEQ ID NO: 987
  source 1..92: mol_type = unassigned RNA

SEQ ID NO: 1081 - RNA, 92 nt, Homo sapiens
  source 1..92: mol_type = unassigned RNA
tttgttccgtgggtggtttaaatacagtacccataataaagggctcagggaatttttggagcaggttttctgacttcggtcggaaaacccct

SEQ ID NO: 1082 - RNA, 92 nt, Homo sapiens
  source 1..92: mol_type = unassigned RNA
tttgttccgtgggtggtttagggctcaggggaggaaccagcgctccacccaatttttggagcaggttttctgacttcggtcggaaaacccct

SEQ ID NO: 1083 - RNA, 82 nt, Homo sapiens
  source 1..82: mol_type = unassigned RNA
tttgttccgtgggtggtttaaaccagcgctccaccccatcaatttttggagcaggttttctgacttcggtcggaaaacccct

SEQ ID NO: 1084 - RNA, 82 nt, Homo sapiens; identical to SEQ ID NO: 957
  source 1..82: mol_type = unassigned RNA

SEQ ID NO: 1085 - RNA, 82 nt, Homo sapiens; identical to SEQ ID NO: 1053
  source 1..82: mol_type = unassigned RNA

SEQ ID NO: 1086 - RNA, 82 nt, Homo sapiens
  source 1..82: mol_type = unassigned RNA
tggggggaggtaggtaggtatagtttgttattagttagaaaatttttggagcaggttttctgacttcggtcggaaaacccct

SEQ ID NO: 1087 - RNA, 86 nt, Homo sapiens
  source 1..86: mol_type = unassigned RNA
tggggggaggtaggtaggtagaggaaccagcgctccaccccatcaatttttggagcaggttttctgacttcggtcggaaaacccct

SEQ ID NO: 1088 - RNA, 86 nt, Homo sapiens; identical to SEQ ID NO: 995
  source 1..86: mol_type = unassigned RNA

SEQ ID NO: 1089 - RNA, 86 nt, Homo sapiens
  source 1..86: mol_type = unassigned RNA
tggggggaggtaggtaggtatatcctatacaaaatagaaatataaatttttggagcaggttttctgacttcggtcggaaaacccct

SEQ ID NO: 1090 - RNA, 86 nt, Homo sapiens
  source 1..86: mol_type = unassigned RNA
tggggggaggtaggtaggtatatatagtttgttattagttagaaaatttttggagcaggttttctgacttcggtcggaaaacccct

SEQ ID NO: 1091 - RNA, 88 nt, Homo sapiens
  source 1..88: mol_type = unassigned RNA
tggggggaggtaggtaggtagggaggaaccagcgctccaccccatcaatttttggagcaggttttctgacttcggtcggaaaacccct

SEQ ID NO: 1092 - RNA, 88 nt, Homo sapiens; identical to SEQ ID NO: 999
  source 1..88: mol_type = unassigned RNA

SEQ ID NO: 1093 - RNA, 88 nt, Homo sapiens
  source 1..88: mol_type = unassigned RNA
tggggggaggtaggtaggtaattatcctatacaaaatagaaatataaatttttggagcaggttttctgacttcggtcggaaaacccct

SEQ ID NO: 1094 - RNA, 92 nt, Homo sapiens
  source 1..92: mol_type = unassigned RNA
tggggggaggtaggtaggtatcaggggaggaaccagcgctccaccccatcaatttttggagcaggttttctgacttcggtcggaaaacccct

SEQ ID NO: 1095 - RNA, 92 nt, Homo sapiens; identical to SEQ ID NO: 1002
  source 1..92: mol_type = unassigned RNA

SEQ ID NO: 1096 - RNA, 92 nt, Homo sapiens
  source 1..92: mol_type = unassigned RNA
tggggggaggtaggtaggtacaagattatcctatacaaaatagaaatataaatttttggagcaggttttctgacttcggtcggaaaacccct

SEQ ID NO: 1097 - RNA, 82 nt, Homo sapiens; identical to SEQ ID NO: 1004
  source 1..82: mol_type = unassigned RNA

SEQ ID NO: 1098 - RNA, 82 nt, Homo sapiens; identical to SEQ ID NO: 1005
  source 1..82: mol_type = unassigned RNA

SEQ ID NO: 1099 - RNA, 82 nt, Homo sapiens
  source 1..82: mol_type = unassigned RNA
tggggggaggtaggtaggtaccataataaagggctcagggaatttttggagcaggttttctgacttcggtcggaaaacccct

SEQ ID NO: 1100 - RNA, 82 nt, Homo sapiens
  source 1..82: mol_type = unassigned RNA
tggggggaggtaggtaggtagaggaaccagcgctccacccaatttttggagcaggttttctgacttcggtcggaaaacccct

SEQ ID NO: 1101 - RNA, 86 nt, Homo sapiens; identical to SEQ ID NO: 1008
  source 1..86: mol_type = unassigned RNA

SEQ ID NO: 1102 - RNA, 86 nt, Homo sapiens; identical to SEQ ID NO: 1009
  source 1..86: mol_type = unassigned RNA

SEQ ID NO: 1103 - RNA, 86 nt, Homo sapiens
  source 1..86: mol_type = unassigned RNA
tggggggaggtaggtaggtagtacccataataaagggctcagggaatttttggagcaggttttctgacttcggtcggaaaacccct

SEQ ID NO: 1104 - RNA, 86 nt, Homo sapiens
  source 1..86: mol_type = unassigned RNA
tggggggaggtaggtaggtaaggggaggaaccagcgctccacccaatttttggagcaggttttctgacttcggtcggaaaacccct

SEQ ID NO: 1105 - RNA, 88 nt, Homo sapiens; identical to SEQ ID NO: 1012
  source 1..88: mol_type = unassigned RNA

SEQ ID NO: 1106 - RNA, 88 nt, Homo sapiens; identical to SEQ ID NO: 1013
  source 1..88: mol_type = unassigned RNA

SEQ ID NO: 1107 - RNA, 88 nt, Homo sapiens
  source 1..88: mol_type = unassigned RNA
tggggggaggtaggtaggtacagtacccataataaagggctcagggaatttttggagcaggttttctgacttcggtcggaaaacccct

SEQ ID NO: 1108 - RNA, 92 nt, Homo sapiens; identical to SEQ ID NO: 1015
  source 1..92: mol_type = unassigned RNA

SEQ ID NO: 1109 - RNA, 92 nt, Homo sapiens; identical to SEQ ID NO: 1016
  source 1..92: mol_type = unassigned RNA

SEQ ID NO: 1110 - RNA, 92 nt, Homo sapiens
  source 1..92: mol_type = unassigned RNA
tggggggaggtaggtaggtaaatacagtacccataataaagggctcagggaatttttggagcaggttttctgacttcggtcggaaaacccct

SEQ ID NO: 1111 - RNA, 82 nt, Homo sapiens; identical to SEQ ID NO: 923
  source 1..82: mol_type = unassigned RNA

SEQ ID NO: 1112 - RNA, 110 nt, Homo sapiens
  source 1..110: mol_type = unassigned RNA
atgatagggacttagggtgagtaatacagtacccataataaaggagcaagattatcctatataaaataaatttttggagcaggttttctgacttcggtcggaaaacccct

SEQ ID NO: 1113 - RNA, 118 nt, Homo sapiens
  source 1..118: mol_type = unassigned RNA
atgatagggacttagggtgagggtaatacagtacccataataaagggcggagcaagattatcctatataaaatagaaatttttggagcaggttttctgacttcggtcggaaaacccct

SEQ ID NO: 1114 - RNA, 122 nt, Homo sapiens
  source 1..122: mol_type = unassigned RNA
atgatagggacttagggtgaggggtaatacagtacccataataaagggcttggagcaagattatcctatataaaatagaaaatttttggagcaggttttctgacttcggtcggaaaacccct

SEQ ID NO: 1115 - RNA, 110 nt, Homo sapiens
  source 1..110: mol_type = unassigned RNA
atgatagggacttagggtgaaggggtaatacagtacccataataagattatcctatataaaatagaaaaatttttggagcaggttttctgacttcggtcggaaaacccct

SEQ ID NO: 1116 - RNA, 118 nt, Homo sapiens
  source 1..118: mol_type = unassigned RNA
atgatagggacttagggtgaaaaaggggtaatacagtacccataataaaagattatcctatataaaatagaaatataatttttggagcaggttttctgacttcggtcggaaaacccct

SEQ ID NO: 1117 - RNA, 122 nt, Homo sapiens
  source 1..122: mol_type = unassigned RNA
atgatagggacttagggtgacaaaaggggtaatacagtacccataataaacaagattatcctatataaaatagaaatataaatttttggagcaggttttctgacttcggtcggaaaacccct

SEQ ID NO: 1118 - RNA, 110 nt, Homo sapiens
  source 1..110: mol_type = unassigned RNA
atgatagggacttagggtgatacagtacccataataaagggctgttggagcaagattatcctatataaaatttttggagcaggttttctgacttcggtcggaaaacccct

SEQ ID NO: 1119 - RNA, 118 nt, Homo sapiens
  source 1..118: mol_type = unassigned RNA
atgatagggacttagggtgaatacagtacccataataaagggctgaggaagttggagcaagattatcctatataaaaatttttggagcaggttttctgacttcggtcggaaaacccct

SEQ ID NO: 1120 - RNA, 122 nt, Homo sapiens
  source 1..122: mol_type = unassigned RNA
atgatagggacttagggtgaaatacagtacccataataaagggctgagggcaagttggagcaagattatcctatataaaaaatttttggagcaggttttctgacttcggtcggaaaacccct

SEQ ID NO: 1121 - RNA, 110 nt, Homo sapiens
  source 1..110: mol_type = unassigned RNA
atgatagggacttagggtgaaggggtaatacagtacccataatattggagcaagattatcctatataaaatttttggagcaggttttctgacttcggtcggaaaacccct

SEQ ID NO: 1122 - RNA, 118 nt, Homo sapiens
  source 1..118: mol_type = unassigned RNA
atgatagggacttagggtgaaaaaggggtaatacagtacccataataaaagttggagcaagattatcctatataaaaatttttggagcaggttttctgacttcggtcggaaaacccct

SEQ ID NO: 1123 - RNA, 122 nt, Homo sapiens
  source 1..122: mol_type = unassigned RNA
atgatagggacttagggtgacaaaaggggtaatacagtacccataataaacaagttggagcaagattatcctatataaaaaatttttggagcaggttttctgacttcggtcggaaaacccct

SEQ ID NO: 1124 - RNA, 110 nt, Homo sapiens
  source 1..110: mol_type = unassigned RNA
atgatagggacttagggtgatacagtacccataataaagggctgagattatcctatataaaatagaaaaatttttggagcaggttttctgacttcggtcggaaaacccct

SEQ ID NO: 1125 - RNA, 118 nt, Homo sapiens
  source 1..118: mol_type = unassigned RNA
atgatagggacttagggtgaatacagtacccataataaagggctgaggaagattatcctatataaaatagaaatataatttttggagcaggttttctgacttcggtcggaaaacccct
